(19) United States
(12) Patent Application Publication
(10) Pub. No.: US 2007/0166788 A1
(43) Pub. Date: Jul. 19, 2007

(54) Methods for production of receptor and ligand isoforms

(76) Inventors: Pei Jin, (US); H. Michael Shepard, (US); Cornelia M. Gorman, (US); Juan Zhang, (US)

Correspondence Address: MORRISON & FOERSTER LLP, 755 PAGE MILL RD, PALO ALTO, CA, 94304-1018, US

(21) Appl. No.: 11/591,229

(22) Filed: Oct. 31, 2006

Related U.S. Application Data
(60) Provisional application No. 60/736,134, filed on Nov. 10, 2005.

(51) Int. Cl. A61K 48/00; C12P 21/06; C12N 9/12; C07H 21/04; C12N 5/06

(52) U.S. Cl. 435/69.1; 435/194; 435/320.1; 435/325; 536/23.2; 435/364; 435/366; 435/349; 435/353; 435/354; 435/358; 514/44

(57) ABSTRACT

Provided are methods for production of cell surface receptor (CSR) and ligand isoforms. In particular, isoform fusions that a precursor sequence for secretion, processing and intracellular trafficking are provided. Nucleic acid molecules encoding the fusions are expressed in a host cell and the encoded and partially or completely processed encoded CSR or ligand isoforms is produced in the cell culture medium. The resulting polypeptide optionally includes an epitope tag for the detection and/or purification thereof.

### RELATED APPLICATIONS

[0001] Benefit of priority is claimed to U.S. provisional application Ser. No. 60/736,134, filed Nov. 10, 2005, entitled “METHODS FOR PRODUCTION OF RECEPTOR AND LIGAND ISOFORMS,” to Pei Jin, H. Michael Shepard, Cornelia Gorman and Juan Zhang.

[0002] This application is related to International PCT Application Ser. No. (Attorney Docket No. 17118-041W01/2822PC), filed the same day herewith, entitled “METHODS FOR PRODUCTION OF RECEPTOR AND LIGAND ISOFORMS,” to Receptor Biologix, Inc., Pei Jin, H. Michael Shepard, Cornelia Gorman and Juan Zhang, which also claims priority to U.S. Provisional Application Ser. No. 60/736,134.

[0003] This application is related to U.S. application Ser. No. 10/846,113, filed May 14, 2004, and to corresponding International PCT application No. WO 05/016966, published Feb. 24, 2005, entitled “INTRON FUSION PROTEINS, AND METHODS OF IDENTIFYING AND USING SAME.” This application also is related to U.S. application Ser. No. 11/129,740, filed May 13, 2005, and to corresponding International PCT application No. US2005/17051, filed May 13, 2005, entitled “CELL SURFACE RECEPTOR ISOFORMS AND METHODS OF IDENTIFYING AND USING THE SAME.” The application also is related to U.S. Provisional application No. 60/678,076, entitled “ISOFORMS OF RECEPTOR FOR ADVANCED GLYCATION END PRODUCTS (RAGE) AND METHODS OF IDENTIFYING AND USING SAME”, filed May 04, 2005. This application also is related to U.S. application No. (Attorney Docket No. 17118-045001/2824) and to International application No. (Attorney Dockety No. 17118-045W01/2824PC), entitled “HEPATOCYTE GROWTH FACTOR INTRON FUSION PROTEINS,” filed the same day herewith, which each claim priority to U.S. Provisional Application No. 60/735,609 filed Nov. 10, 2005.

[0004] The subject matter of each of the above-noted applications, provisional applications and international applications as well as any applications noted throughout the disclosure herein is incorporated herein by reference thereto.

[0005] An electronic version on compact disc (CD) ROM of the Sequence Listing is filed herewith in duplicate, the contents of which are incorporated by reference in their entirety. The computer-readable file on each of the aforementioned duplicate compact discs created on Oct. 31, 2006, is identical, 1,589 kilobytes in size, and is entitled 2822SEQ.001.txt.

### FIELD OF THE INVENTION

[0006] Provided are methods for production of cell surface receptor (CSR) and ligand isoforms. In particular, isoform fusions that contain a precursor sequence for secretion, processing and intracellular trafficking are provided. Nucleic acid molecules encoding the fusions are expressed in a host cell and the encoded and partially or completely processed CSR or ligand isoform is produced in the cell culture medium. The resulting polypeptide optionally includes an epitope tag for the detection and/or purification thereof.

### BACKGROUND

[0007] Cell signaling pathways involve a network of molecules including polypeptides and small molecules that interact to transmit extracellular, intercellular and intracellular signals. Such pathways interact like a relay, handing off signals from one member of the pathway to the next. Modulation of the activity of one member of the pathway can be transmitted through the signal transduction pathway, resulting in modulation of activities of other pathway members and modulation of the outcomes of such signal transduction, such as affecting phenotypes and responses of a cell or organism to a signal. Diseases and disorders can involve misregulation, or changes in modulation, of signal transduction pathways. A goal of drug development is to target such misregulated pathways to restore more normal regulation in the signal transduction pathway.

[0008] Receptor tyrosine kinases (RTKs) are among the polypeptides involved in many signal transduction pathways. RTKs play a role in a variety of cellular processes, including cell division, proliferation, differentiation, migration and metabolism. RTKs can be activated by ligands. Such activation in turn activates events in a signal transduction pathway, such as by triggering autocrine or paracrine cellular signaling pathways, for example, activation of second messengers, which results in specific biological effects. Ligands for RTKs specifically bind to the cognate receptors.

[0009] RTKs have been implicated in a number of diseases including cancers such as breast and colorectal cancers, gastric carcinoma, gliomas and mesodermal-derived tumors. Disregulation of RTKs has been noted in several cancers. For example, breast cancer can be associated with amplified expression of p185-HER2. RTKs also have been associated with diseases of the eye, including diabetic retinopathies and macular degeneration. RTKs also are associated with regulating pathways involved in angiogenesis, including physiologic and tumor blood vessel formation. RTKs also are implicated in the regulation of cell proliferation, migration and survival.

[0010] The human epidermal growth factor receptor 2 gene (HER-2; also referred to as ErbB2) encodes a receptor tyrosine kinase that has been implicated as an oncogene. HER-2 has a major mRNA transcript of 4.5 Kb that encodes a polypeptide of about 185 kDa (p185HER2). P185HER2 contains an extracellular domain, a transmembrane domain and an intracellular domain with tyrosine kinase activity. Several polypeptide forms are produced from the HER-2 gene and include polypeptides generated by proteolytic processing and forms generated from alternatively spliced RNAs. Herstatins and fragments thereof are HER-2 binding proteins, encoded by the HER-2 gene. Herstatins (also referred to as p68HER-2) are encoded by alternatively spliced variants of the gene encoding thep 185-HER2receptor. For example, one herstatin occurs in fetal kidney and liver, and includes a 79 amino acid intron-encoded insert, relative to the membrane-localized receptor, at the C terminus (see U.S. Pat. No. 6,414,130 and U.S. Published Application No. 20040022785). Several herstatin variants have been identified (see, e.g., U.S. Pat. No. 6,414,130; U.S. Published Application No. 20040022785, U.S. application Ser. No. 09/234,208; U.S. application Ser. No.09/506,079; published international application Nos. WO0044403 and WO0161356). Herstatins lack an epidermal growth factor (EGF) homology domain and contain part of the extracellular domain, typically the first 340 amino acids, of p185-HER2. Herstatins contain subdomains I and II of the human epidermal growth factor receptor, the HER-2 extracellular domain and a C-terminal domain encoded by an intron. The resulting herstatin polypeptides typically contain 419 amino acids (340 amino acids from subdomains I and II, plus 79 amino acids from intron 8). The herstatin proteins lack extracellular domain IV, as well as the transmembrane domain and kinase domain.

[0011] In contrast, positive acting EGFR ligands, such as the epidermal growth factor and transforming growth factor-alpha, possess such domains. Additionally, binding of a herstatin does not activate the receptor. Herstatins can inhibit members of the EGF-family of receptor tyrosine kinases as well as the insulin-like growth factor-1 (IGF-1) receptor and other receptors. Herstatins prevent the formation of productive receptor dimers (homodimers and heterodimers) required for transphosphorylation and receptor activation. Alternatively or additionally, herstatin can compete with a ligand for binding to the receptor terminus (see, U.S. Pat. No. 6,414,130; U.S. Published Application No. 20040022785, U.S. application Ser. No. 09/234,208; U.S. application Ser. No.09/506,079; published international application Nos. WO0044403 and WO0161356).

[0012] The tumor necrosis factor family of receptors (TNFRs) is another example of a family of receptors involved in signal transduction and regulation. The TNF ligand and receptor family regulate a variety of signal transduction pathways including those involved in cell differentiation, activation, and viability. TNFRs contain an extracellular domain, including a ligand binding domain, a transmembrane domain and an intracellular domain that participates in signal transduction. Additionally, TNFRs are typically trimeric proteins that trimerize at the cell surface. TNFRs play a role in inflammatory diseases, central nervous system diseases, autoimmune diseases, airway hyper-responsiveness conditions such as asthma, rheumatoid arthritis and inflammatory bowel disease. TNFRs also play a role in infectious diseases, such as viral infection.

[0013] The TNF family of receptors (TNFR) exhibit homology among the extracellular domains. Some of these receptors initiate apoptosis, some initiate cell proliferation and some initiate both activities. Signaling by this family requires clustering of the receptors by a trimeric ligand and subsequent association of proteins with the cytoplasmic region of the receptors. The TNFR family contains a sub family with homologous 80-amino-acid cytoplasmic domains. This domain is referred to as a death domain (DD), so named because proteins that contain this domain are involved in apoptosis. The distinction between members of the TNFR family is exemplified by two TNFRs coded by distinct genes. TNFR1 (55 kDa) signals the initiation of apoptosis and the activation of the transcription factor NFκB. TNFR2 (75 kDa) functions also to induce signal activation of NFκB but not the initiation of apoptosis. TNFR1 contains a DD; TNFR2 does not.

[0014] In some cases, accumulations of altered molecules can be causative of pathological conditions and disease. In other cases, a disease or condition can result in altered molecule metabolism and lead to the accumulations of particular molecules in altered form and/or amount. One example is the accumulation of proteins and lipids as glycated products. The products, referred to as advanced glycation end products (AGEs), are the result of nonenzymatic glycation and oxidation of proteins and lipids in the presence of aldose sugars. Initial early products are formed as reversible Schiff bases and Amadori products. Molecular rearrangements result in irreversible modifications to form AGEs. AGEs accumulate during the normal aging process in humans. AGE accumulation can be accelerated in particular diseases and conditions.

[0015] The accumulation of AGEs impact cell and tissue metabolism and signal transduction through their interactions with cellular binding proteins. One such binding protein is the receptor for advanced glycation end products (RAGE). RAGE interaction with AGEs is implicated in induction of cellular oxidant stress responses, including the RAS-MAP kinase pathway and NF-κB activation.

[0016] RAGE also binds to other molecules, including small molecules and proteins. S100A12 (also known as EN-RAGE, p6 and calgranulin C) is a calcium binding protein that can act as a ligand for RAGE. RAGE also can interact with β-sheet fibrilar materials including amyloid β-peptides, Aβ, amylin, serum amyloid A and prion-derived peptides. Amphoterin, a heparin-binding neurite outgrowth promoting protein also is a ligand for RAGE. Each of these ligand interactions can affect signal transduction pathways. Binding of these ligands to RAGE leads to cellular activation mediated by receptor-dependent signaling to thereby mediate or participate in a variety of disease processes. These include diabetic complications, amyloidoses, inflammatory/immune disorders and tumors.

[0017] Because of their involvement in a variety of diseases and conditions, cell surface receptors (CSRs) such as RTKs, RAGE and TNFRs and their ligands are targets for therapeutic intervention. Among therapeutic proteins of interest are isoforms of cell surface receptors (CSR), and isoforms of ligands of CSRs, that modulate an activity of a CSR involved in a variety of diseases and conditions, including cancers, angiogenesis, and other diseases involving undesirable cell proliferation and inflammatory reactions (see, e.g., copending U.S. application Ser. No. 10/846,113 and corresponding International PCT published application No. WO 05/016,966; U.S. application Ser. No. 11/129,740 and corresponding International PCT published application No. WO 05/113,596; U.S. Provisional application No. 60/678,076 and corresponding U.S. application No. 11/429,090 and International application No. PCTUS2006/17786; and U.S. Provisional application No. 60/735,609 and corresponding U.S. application No. (Attorney Docket No. 17118-045001/2824) and International application No. (Attorney Dockety No. 17118-045WO1/2824PC). These therapeutic proteins target diseases and disorders that involve disregulation of and/or changes in the modulation of signal transduction pathways

[0018] To permit effective use of such therapeutic molecules, it is important to optimize methods for production. While such molecules are known and available, a need exists to produce large quantities for widespread dissemination and use thereof . Accordingly, among the objects herein, it is an object to provide methods for production of such therapeutic isoforms as well as nucleic acid molecules that encode fusions of the therapeutic molecules with polypeptides that improve the secretion, expression, and/or purification thereof.

### SUMMARY

[0019] Provided are methods and products for production of therapeutic isoforms of CSRs and ligands and nucleic acid molecules that encode fusions of the therapeutic isoforms, that improve the secretion, expression, and/or purification. The isoforms can additionally can include additional functional moieties, such as multimerization domains, including Fc domains.

[0020] Provided herein are polypeptides of receptor tyrosine kinase (RTK) isoforms, including intron fusion proteins, operatively linked to a heterologous precursor sequence sufficient to effect secretion and/or trafficking of the RTK isoform. The RTK isoforms provided herein for operative linkage include those that contain an endogenous signal sequence and those that do not contain an endogenous signal sequence.

[0021] Provided herein are RTK isoform polypeptides operatively linked to a tissue plasminogen activator (tPA) precursor sequence (tPA pre/prosequence), or a sufficient portion of a tPA pre/prosequence to effect secretion of the RTK isoform. Included are RTK isoform polypeptides operatively linked to a tPA pre/prosequence having a sequence of amino acids set forth in SEQ ID NO:2, or allelic variants thereof.

[0022] Provided herein are RTK isoform polypeptides including any one of RTK that is an isoform of a VEGFR, FGFR, PDGFR, MET, EPH, TIE, DDR, or HER polypeptide including isoforms of a DDR1, EphA1, EphA2, EphB1, EphB4, EGFR, HER2, ErbB3, FGFR-1, FGFR-2, FGFR-4, MET, RON, CSF1R, KIT, PDGFR-A, PDGFR-B, TEK, Tie-1, VEGFR-1, VEGFR-2, or VEGFR-3 operatively linked to a tPA pre/prosequence.

[0023] Provided herein are RTK isoforms having a sequence of amino acids set forth in any one of SEQ ID NOS: 140, 142, 143, 145, 147, 149, 150,152, 153, 155, 157, 159, 161-168, 170, 172, 174, 176, 178, 180,181, 183, 185, 186, 188, 190, 192, 194, 196, 198, 200, 202, 204, 206, 208, 210, 212, 214, 216, 217, 219, 221, 223, 225, 227, 229-231, 233, 245, 247-251, 253, 255, 257, 259, 261, 263-270, 274-280, 282, 284, 286, 288, 289-303, or an active portion thereof operatively linked to all or a portion of a tPA pre/prosequence sufficient to effect secretion of the isoform.

[0024] Provided herein are RTK isoforms, including intron fusion proteins, operatively linked to a tPA pre/prosequence by a linker, including a restriction enzyme linker. Included are polypeptides of RTK isoforms wherein the restriction enzyme linker is joined between the isoform and all or a portion of a tPA pre/prosequence to effect secretion of the isoform. Also included are polypeptides of RTK isoforms optionally including a tag that facilitates polypeptide purification and/or detection. The tag can be joined between the restriction enzyme linker and all or a portion of a tPA pre/prosequence to effect secretion of the polypeptide. Alternatively, the tag can be joined between the restriction enzyme linker and the isoform. The tag can be a myc tag or a Poly His tag.

[0025] Provided herein are isoform polypeptides of a VEGFR-1, FGFR-2, FGFR-4, TEK, RON, or MET operatively linked to all or a portion of a tPA pre/prosequence containing a restriction enzyme linker and also optionally a myc tag. The tPA-isoform fusions, including tPA-intron fusion protein fusions, have a sequence of amino acids set forth in any one of SEQ ID NOS: 32, 34, 36, 40, 42, 46, or 48.

[0026] Provided herein are isoform polypeptides of a HER2, including intron fusion proteins, operatively linked to all or a portion of a tPA pre/prosequence containing a restriction enzyme linker and also optionally a Poly-His tag. The tPA-HER2 isoform- has a sequence of amino acids set forth in SEQ ID NO:38.

[0027] Provided herein are polypeptides of receptor for advanced glycation endproducts (RAGE) isoforms, including intron fusion proteins, operatively linked to a heterologous precursor sequence sufficient to effect secretion and/or trafficking of the RAGE isoform. The RAGE isoforms provided herein for operative linkage include those that contain an endogenous signal sequence and those that do not contain an endogenous signal sequence.

[0028] Provided herein are RAGE isoform polypeptides operatively linked to a tissue plasminogen activator (tPA) precursor sequence (tPA pre/prosequence), or a sufficient portion of a tPA pre/prosequence to effect secretion of the RAGE isoform. Included are RAGE isoform polypeptides operatively linked to a tPA pre/prosequence having a sequence of amino acids set forth in SEQ ID NO:2, or allelic variants thereof.

[0029] Provided herein are a RAGE isoforms having a sequence of amino acids set forth in any one of SEQ ID NOS: 235, 237, 239, 241, 243 or an active portion thereof operatively linked to all or a portion of a tPA pre/prosequence sufficient to effect secretion of the isoform.

[0030] Provided herein are RAGE isoforms, including intron fusion proteins, operatively linked to a tPA pre/prosequence by a linker, including a restriction enzyme linker. Included are polypeptides of RAGE isoform intron fusion proteins wherein the restriction enzyme linker is joined between the isoform and all or a portion of a tPA pre/prosequence to effect secretion of the isoform. Also included are polypeptides of RTK isoforms optionally including a tag that facilitates polypeptide purification and/or detection. The tag can be joined between the restriction enzyme linker and all or a portion of a tPA pre/prosequence to effect secretion of the polypeptide. The tag can be a myc tag.

[0031] Provided herein are isoform polypeptides of a RAGE operatively linked to all or a portion of a tPA pre/prosequence containing a restriction enzyme linker and also optionally a myc tag. The tPA-RAGE isoform has a sequence of amino acids set forth in SEQ ID NO: 44.

[0032] Provided herein are polypeptides of tumor necrosis factor receptor (TNFR) isoforms, including intron fusion proteins, operatively linked to a heterologous precursor sequence sufficient to effect secretion and/or trafficking of the TNFR isoform. The TNFR isoforms provided herein for operative linkage include those that contain an endogenous signal sequence and those that do not contain an endogenous signal sequence.

[0033] Provided herein are TNFR isoform polypeptides operatively linked to a tissue plasminogen activator (tPA) precursor sequence (tPA pre/prosequence), or a sufficient portion of a tPA pre/prosequence to effect secretion of the TNFR isoform. Included are TNFR isoform polypeptides operatively linked to a tPA pre/prosequence having a sequence of amino acids set forth in SEQ ID NO:2, or allelic variants thereof.

[0034] Provided herein are TNFR isoform polypeptides including an isoform of a TNFR1 or TNFR2 operatively linked to a tPA pre/prosequence.

[0035] Provided herein are a TNFR2 isoforms having a sequence of amino acids set forth in any one of SEQ ID NO: 272, or an active portion thereof operatively linked to all or a portion of a tPA pre/prosequence sufficient to effect secretion of the isoform.

[0036] Provided herein are TNFR isoform polypeptides, including intron fusion proteins, operatively linked to a tPA pre/prosequence by a linker, including a restriction enzyme linker. Included are polypeptides of TNFR isoforms wherein the restriction enzyme linker is joined between the isoform and all or a portion of a tPA pre/prosequence to effect secretion of the isoform. Also included are polypeptides of TNFR isoforms optionally including a tag that facilitates polypeptide purification and/or detection. The tag can be joined between the restriction enzyme linker and all or a portion of a tPA pre/prosequence to effect secretion of the polypeptide. The tag can be a myc tag.

[0037] Provided herein are polypeptides of hepatocyte growth factor (HGF) isoforms, including intron fusion proteins, operatively linked to a heterologous precursor sequence sufficient to effect secretion and/or trafficking of the HGF isoforms. The HGF isoforms provided herein for operative linkage include those that contain an endogenous signal sequence and those that do not contain an endogenous signal sequence.

[0038] Provided herein are HGF isoform polypeptides operatively linked to a tissue plasminogen activator (tPA) precursor sequence (tPA pre/prosequence), or a sufficient portion of a tPA pre/prosequence to effect secretion of the HGF isoform. Included are HGF isoform polypeptides operatively linked to a tPA pre/prosequence having a sequence of amino acids set forth in SEQ ID NO:2, or allelic variants thereof.

[0039] Provided herein are HGF isoforms having a sequence of amino acids set forth in any one of SEQ ID NO: 350, 352, or 354, or an active portion thereof operatively linked to all or a portion of a tPA pre/prosequence sufficient to effect secretion of the isoform.

[0040] Provided herein are HGF isoform polypeptides, including intron fusion proteins, operatively linked to a tPA pre/prosequence by a linker, including a restriction enzyme linker. Included are polypeptides of HGF isoforms wherein the restriction enzyme linker is joined between the isoform and all or a portion of a tPA pre/prosequence to effect secretion of the isoform. Also included are polypeptides of HGF isoforms optionally including a tag that facilitates polypeptide purification and/or detection. The tag can be joined between the restriction enzyme linker and all or a portion of a tPA pre/prosequence to effect secretion of the polypeptide. The tag can be a myc tag.

[0041] Also encompassed are polypeptides that are allelic variants, species variants, or variants having at least 80%, 85%, 90%, 95%, 96%, 97%, 98%, 99%, or more sequence identity to any of the polypeptide isoforms provided herein and that retain an activity as compared to an isoform of a polypeptide provided herein.

[0042] Provided herein are DNA constructs containing nucleic acid molecules encoding CSR isoforms, including isoforms of RTK, TNFR, or RAGE operatively linked to a heterologous precursor sequence. Included among these are nucleic acids of the tPA pre/prosequence isoform polypeptide fusions. Provided herein are nucleic acid molecules having a sequence of nucleic acids set forth in SEQ ID NOS. 31, 33, 35, 37, 39, 41, 43, 45, or 47, and allelic variants thereof.

[0043] Provided herein are vectors containing the nucleic acid molecules. Vectors include mammalian vectors. Included among mammalian vectors are a pDrive vector, pCI vector, or pcDNA 3.1 vector. Vectors also can include an adenovirus vector, an adeno-associated virus vector, EBV, SV40, cytomegalovirus vector, vaccinia virus vector, herpesvirus vector, a retrovirus vector, a lentivirus vector, or an artificial chromosome. Vectors can be those that remain episomal or integrate into the chromosome of a cell into which they are introduced.

[0044] Also provided are cells containing a vector as described herein. Cells include mammalian cells. Included among mammalian cells are mouse, rat, human, monkey, chicken, or hamster cells, including CHO, Balb/3T3, HeLa, MT2, mouse NS0 and other myeloma cell lines, hybridoma and heterohybridoma cell lines, lymphocytes, fibroblasts, Sp2/0, COS, NIH3T3, HEK293, 293T, S93S, 2B8, HKB, or EBNA-l cells.

[0045] Provided herein are methods of producing an isoform by culturing any of the cells described herein to effect the secretion of an isoform. The secreted isoform can be further purified from the cell culture. An epitope tag expressed by the secreted isoform can facilitate protein purification. Also provided herein are methods by which the secreted isoform is treated with an exoprotease, including a plasmin-like exoprotease.

[0046] Provided herein are methods of producing an isoform by introducing a cell with a DNA construct to effect the secretion of the isoform from the cells. Exemplary DNA constructs include any described herein encoding a polypeptide of an isoform operatively linked to a heterologous precursor sequence such as a tPA pre/prosequence. The DNA construct can be introduced into a mammalian cell including mouse, rat, human, monkey, chicken, or hamster cells, including CHO, Balb/3T3, HeLa, MT2, mouse NS0 and other myeloma cell lines, hybridoma and heterohybridoma cell lines, lymphocytes, fibroblasts, Sp2/0, COS, NIH3T3, HEK293, 293T, S93S, 2B8, HKB, or EBNA-1 cells. Introduction of a DNA construct can be by transfection, electroporation, or nuclear microinjection. Exemplary methods of introducing a DNA construct into a cell include using calcium phosphate, a cationic lipid reagent, or a polycation. Examples of cationic lipid compounds include, but are not limited to: Lipofectin (Life Technologies, Inc., Burlington, Ont.)(1:1 (w/w) formulation of the cationic lipid N-[1-(2,3-dioleyloxy)propyl]-N,N,N-trimethylammonium chloride (DOTMA) and dioleoyl-phosphatidyl-ethanol-amine (DOPE)); LipofectAMINE (Life Technologies, Burlington, Ont., see U.S. Pat. No. 5,334,761) (3:1 (w/w) formulation of polycationic lipid 2,3-dioleyloxy-N-[2(spermine-carboxamido)ethyl]-N,N-dimethyl-1-propanaminiumtrifluoroacetate (DOSPA) and dioleoyl phosphatidyi-ethanolamine (DOPE)), LipofectAMINE PLUS (Life Technologies, Burlington, Ont. see U.S. Pat. Nos. 5,334,761 and 5,736,392; see, also U.S. Pat. No. 6,051,429) (LipofectAmine and Plus reagent), LipofectAMINE 2000 (Life Technologies, Burlington, Ont.; see also International PCT application No. WO 00/27795). Further provided herein, are methods of purifying the isoform from the cell culture. Purification can be facilitated by expression of an epitope tag by the isoform. Also provided herein are methods by which the secreted isoform is treated with an exoprotease, including a plasmin-like exoprotease.

[0047] Provided herein are polypeptides of cell surface receptor or ligand isoforms, including intron fusion protein iso forms, that lack an endogenous precursor sequence and further contain additional amino acids at its N-terminus. The endogenous precursor sequence that the polypeptide lacks can be a signal sequence or can be a signal sequence and one additional amino acid. Exemplary iso forms include isoforms of CSRs including isoforms of an RTK, TNFR, or RAGE receptor. Isoforms also can include ligand isoforms such as an HGF isoform. The iso forms provided herein as polypeptides lacking a precursor sequence have a sequence of amino acids set forth in any one of SEQ ID NOS: 140, 142, 143, 145, 147, 149, 150, 152, 153, 155, 157, 159, 161-168, 170, 172, 174, 176, 178, 180, 181, 183, 185, 186, 188,190, 192, 194,196, 198,200,202, 204,206, 208, 210, 212, 214, 216, 217, 219, 221, 223, 225, 227, 229-231, 233, 235, 237, 239, 241, 243, 245, 247-251, 253, 255, 257, 259, 261, 263-270, 272, 274-280, 282, 284, 286, 288, 289-303, 350, 352, or 354, or an active portion thereof. The one or more additional amino acids included at the N-terminus of a polypeptide of an isoform provided herein can include a restriction enzyme linker sequence, a portion of a prosequence of tPA, or an epitope tag. Included among sequences that can be included at the N-terminus of an isoform polypeptide include GAR, SR, LE, or combinations thereof including GARSR or GARLE. Also provided are pharmaceutical compositions containing the polypeptide isoforms that contain one or more additional amino acids at their N-terminus.

[0048] Provided herein are methods of treating a disease or condition by administering any of the pharmaceutical compositions, described herein. Diseases or conditions treated include inflammatory diseases, cancer, angiogenesis-mediated diseases, or hyperproliferative diseases. Exemplary diseases include, but are not limited to, ocular disease, atherosclerosis, diabetes, rheumatoid arthritis, hemangioma, wound healing, Alzheimer's disease, Creutzfeldt-Jakob disease, Huntington's disease, smooth muscle proliferative-related disease, multiple sclerosis, cardiovascular disease, and kidney disease.

[0049] Exemplary of cancers are carcinoma, lymphoma, blastoma, sarcoma, leukemia, lymphoid malignancies, squamous cell cancer, lung cancer including small-cell lung cancer, non-small-cell lung cancer, adenocarcinoma of the lung and squamous carcinoma of the lung, cancer of the peritoneum, hepatocellular cancer, gastrointestinal cancer, pancreatic cancer, glioblastoma, cervical cancer, ovarian cancer, liver cancer, bladder cancer, hepatoma, breast cancer, colon cancer, rectal cancer, colorectal cancer, endometrial/uterine carcinoma, salivary gland carcinoma, kidney or renal cancer, prostate cancer, vulval cancer, thyroid cancer, hepatic carcinoma, anal carcinoma, penile carcinoma, and head and neck cancer.

### DETAILED DESCRIPTION

Outline

[0050] A. DEFINITIONS
[0051] B. CELL SURFACE RECEPTOR AND LIGAND ISOFORMS
   [0052] 1. CELL SURFACE RECEPTOR ISOFORMS
   [0053] 2. LIGAND ISOFORMS
   [0054] 3. ALLELIC AND SPECIES VARIANTS OF ISOFORMS AND MUTATIONS
[0055] C. ISOFORM FUSION PROTEIN PRODUCTION
   [0056] 1. SECRETION
   [0057] 2. PURIFICATION AND/OR DETECTION
[0058] D. ISOFORM FUSIONS
   [0059] 1. EXEMPLARY tPA SECRETORY SEQUENCE
   [0060] 2. tPA-INTRON FUSION PROTEIN AND OTHER CSR FUSIONS
      [0061] a. FGFR-2 tPA-intron fusion protein Fusion
      [0062] b. FGFR4-tPA intron fusion protein Fusion
      [0063] c. VEGFR-1-tPA intron fusion protein Fusion
      [0064] d. tPA-MET intron fusion protein FUSION
      [0065] e. tPA-RON intron fusion protein FUSION
      [0066] f. tPA-HER2 intron fusion protein FUSION
      [0067] g. tPA-RAGE intron fusion protein FUSION
      [0068] h. tPA-TEK intron fusion protein FUSION
[0069] E. METHODS FOR PRODUCING NUCLEIC ACID ENCODING ISOFORM FUSION POLYPEPTIDES
   [0070] 1. SYNTHETIC GENES AND POLYPEPTIDES
   [0071] 2. METHODS OF CLONING AND ISOLATING ISOFORMS AND ISOFORM FUSIONS
   [0072] 3. METHODS OF GENERATING AND CLONING intron fusion protein FUSIONS
   [0073] 4. EXPRESSION SYSTEMS
      [0074] a. PROKARYOTIC EXPRESSION
      [0075] b. YEAST
      [0076] c. INSECT CELLS
      [0077] d. MAMMALIAN CELLS
      [0078] e. PLANTS
   [0079] 5. METHODS OF TRANSFECTION AND TRANSFORMATION
   [0080] 6. PRODUCTION AND PURIFICATION
   [0081] 7. SYNTHETIC ISOFORMS
   [0082] 8. FORMATION OF MULTIMERS
      [0083] a. PEPTIDE LINKERS
      [0084] b. POLYPEPTIDE MULTIMERIZATION DOMAINS
         [0085] i. IMMUNOGLOBULIN DOMAIN
            [0086] (A) FC DOMAIN
            [0087] (B) PROTUBERANCES-INTO-CAVITY (I.E. KNOBS AND HOLES)
         [0088] ii. LEUCINE ZIPPER
            [0089] (A) FOS AND JUN
            [0090] (B) GCN4
         [0091] iii. OTHER MULTIMERIZATION DOMAINS
            [0092] R/PKA-AD/AKAP
[0093] F. ASSAYS TO ASSESS ACTIVITY OF AN ISOFORM
   [0094] 1. KINASE ASSAYS
   [0095] 2. COMPLEXATION
   [0096] 3. LIGAND BINDING
   [0097] 4. RECEPTOR BINDING
   [0098] 5. CELL PROLIFERATION ASSAYS
   [0099] 6. MOTOGENIC ASSAYS
   [0100] 7. APOPTOTIC ASSAYS
   [0101] 8. CELL DISEASE MODEL ASSAYS
   [0102] 9. ANIMAL MODELS
[0103] G. PREPARATION, FORMULATION AND ADMINISTRATION OF CSR AND LIGAND ISOFORMS AND CSR AND LIGAND ISOFORM COMPOSITIONS
[0104] H. IN VIVO EXPRESSION OF CSR AND LIGAND ISOFORMS AND GENE THERAPY
   [0105] 1. DELIVERY OF NUCLEIC ACIDS
      [0106] a. VECTORS—EPISOMAL AND INTEGRATING
      [0107] b. ARTIFICIAL CHROMOSOMES AND OTHER NON-VIRAL VECTOR DELIVERY METHODS
      [0108] c. LIPOSOMES AND OTHER ENCAPSULATED FORMS AND ADMINISTRATION OF CELLS CONTAINING THE NUCLEIC ACIDS
   [0109] 2. IN VITRO AND EX VIVO DELIVERY
   [0110] 3. SYSTEMIC, LOCAL AND TOPICAL DELIVERY
[0111] I. EXEMPLARY TREATMENTS AND STUDIES WITH CSR ISOFORMS
   [0112] 1. ANGIOGENESIS-RELATED CONDITIONS
   [0113] 2. ANGIOGENESIS-RELATED ATHEROSCLEROSIS
   [0114] 3. ANGIOGENESIS-RELATED DIABETES
      [0115] a. VASCULAR DISEASE
      [0116] b. PERIODONTAL DISEASE
   [0117] 4. ADDITIONAL ANGIOGENESIS-RELATED TREATMENTS
   [0118] 5. CANCERS
   [0119] 6. ALZHEIMER'S DISEASE
   [0120] 7. SMOOTH MUSCLE PROLIFERATIVE-RELATED DISEASES AND CONDITIONS
   [0121] 8. INFLAMMATORY DISEASES
   [0122] 9. CARDIOVASCULAR DISEASE
   [0123] 10. KIDNEY DISEASE
[0124] J. COMBINATION THERAPIES
[0125] K. EXAMPLES
   A. DEFINITIONS

[0126] Unless defined otherwise, all technical and scientific terms used herein have the same meaning as is commonly understood by one of skill in the art to which the invention(s) belong. All patents, patent applications, published applications and publications, GENBANK sequences, websites and other published materials referred to throughout the entire disclosure herein, unless noted otherwise, are incorporated by reference in their entirety. In the event that there is a plurality of definitions for terms herein, those in this section prevail. Where reference is made to a URL or other such identifier or address, it is understood that such identifiers can change and particular information on the internet can come and go, but equivalent information is known and can be readily accessed, such as by searching the internet and/or appropriate databases. Reference thereto evidences the availability and public dissemination of such information.

[0127] As used herein, a cell surface receptor (CSR) is a protein that is expressed on the surface of a cell and typically includes a transmembrane domain or other moiety that anchors it to the surface of a cell. As a receptor it binds to ligands that mediate or participate in an activity of the cell surface receptor, such as signal transduction or ligand internalization. Cell surface receptors include, but are not limited to, single transmembrane receptors and G-protein coupled receptors. Receptor tyrosine kinases, such as growth factor receptors, also are among such cell surface receptors.

[0128] As used herein, a receptor tyrosine kinase (RTK) refers to a protein, typically a glycoprotein, that is a member of the growth factor receptor family of proteins. Growth factor receptors are typically involved in cellular processes including cell growth, cell division, differentiation, metabolism and cell migration. RTKs also are known to be involved in cell proliferation, differentiation and determination of cell fate as well as tumor growth. RTKs have a conserved domain structure including an extracellular domain, a membrane-spanning (transmembrane) domain and an intracellular tyrosine kinase domain. Typically, the extracellular domain binds to a polypeptide growth factor or a cell membrane-associated molecule or other ligand. The tyrosine kinase domain is involved in positive and negative regulation of the receptor.

[0129] Receptor tyrosine kinases are grouped into families based on, for example, structural arrangements of sequence motifs in their extracellular domains. Structural motifs include, but are not limited to, repeats of regions of: immunoglobulin, fibronectin, cadherin, epidermal growth factor and kringle repeats. Classification by structural motifs has identified greater than 16 families of RTKs, each with a conserved tyrosine kinase domain. Examples of RTKs include, but are not limited to, erythropoietin-producing hepatocellular (EPH) receptors, epidermal growth factor (EGF) receptors, fibroblast growth factor (FGF) receptors, platelet-derived growth factor (PDGF) receptors, vascular endothelial growth factor (VEGF) receptor, cell adhesion RTKs (CAKs), Tie/Tek receptors, insulin-like growth factor (IGF) receptors, and insulin receptor related (IRR) receptors. Exemplary genes encoding RTKs include, but are not limited to, ErbB2, ErbB3, DDR1, DDR2, EGFR, EphA1, EphA8, FGFR-2, FGFR-4, Flt1 (fins-related tyrosine kinase 1 receptor; also known as VEGFR-1), FLK1 (also known as VEGFR-2) MET, PDGFRA, PDGFRB, and TEK (also known as TIE-2).

[0130] Dimerization of RTKs activates the catalytic tyrosine kinase domain of the receptor and tyrosine autophosphorylation. Autophosphorylation in the kinase domain maintains the tyrosine kinase domain in an activated state. Autophosphorylation in other regions of the protein influences interactions of the receptor with other cellular proteins. In some RTKs, ligand binding to the extracellular domain leads to dimerization of the receptor. In some RTKs, the receptor can dimerize in the absence of ligand. Dimerization also can be increased by receptor overexpression.

[0131] As used herein, a tumor necrosis factor receptor (TNFR) refers to a member of a family of receptors that have a characteristic repeating extracellular cysteine-rich motif such as found in TNFR1 and TNFR2. TNFRs also have a variable intracellular domain that differs between members of the TNFR family. The TNFR family of receptors includes, but is not limited to, TNFR1, TNFR2, TNFRrp, the low-affinity nerve growth factor receptor, Fas antigen, CD40, CD27, CD30, 4-1BB, OX40, DR3, DR4, DR5, and herpesvirus entry mediator (HVEM). Ligands for TNFRs include TNF-α, lymphotoxin, nerve growth factor, Fas ligand, CD40 ligand, CD27 ligand, CD30 ligand, 4-1BB ligand, OX40 ligand, APO3 ligand, TRAIL, LIGHT, and BTLA. TNFRs include an extracellular domain, including a ligand binding domain, a transmembrane domain and an intracellular domain that participates in signal transduction. TNFRs are typically trimeric proteins that trimerize at the cell surface.

[0132] As used herein, a ligand is an extracellular substance, generally a polypeptide, that binds to one or more receptors. A ligand can be soluble or can be a transmembrane protein. For purposes herein, a ligand binds to a receptor and induces signal transduction by the receptor.

[0133] As used herein, signal transduction refers to a series of sequential events, such as protein phosphorylations, consequent upon binding of a ligand by a transmembrane receptor, that transfers a signal through a series of intermediate molecules until final regulatory molecules, such as transcription factors, are modified in response to the signal. Responses triggered by signal transduction include the activation of specific genes. Gene activation leads to further effects, since genes are expressed as proteins many of which are enzymes, transcription factors, or other regulators of metabolic activity that mediate any one or more biological activities of a ligand-receptor interaction.

[0134] As used herein, an isoform refers to a protein that has an altered polypeptide structure compared to a full-length wildtype (predominant) form of the cognate protein due to a differences in the nucleic acid sequence and encoded polypeptide of the isoform compared to the corresponding protein. For purposes herein, isoforms include isoforms of a cell surface receptor (CSR) and isoforms of a ligand of a CSR. Generally an isoform provided herein lacks a domain or portion thereof (or includes insertions or both) sufficient to alter an activity, such as an enzymatic activity of a predominant form of the protein, or the structure of the protein. Reference herein to an isoform with altered activity refers to the alteration in an activity by virtue of the different structure or sequence of the isoform compared to a full-length or predominant form of the protein. With reference to an isoform, alteration of activity refers to a difference in activity between the particular isoforms and the predominant or wildtype form. Alteration of an activity includes an enhancement or a reduction of activity. In one embodiment, an alteration of an activity is a reduction in an activity; the reduction can be at least 0.1, 0.5, 1, 2, 3, 4, 5, or 10 fold compared to a wildtype and/or predominant form of the receptor. Typically, an activity is reduced 5, 10, 20, 50, 100 or 1000 fold or more. For example, a ligand can bind to a receptor and initiate or participate in signal transduction.

[0135] As used herein, a ligand isoform refers to a ligand that lacks a domain or portion of a domain or that has a disruption in a domain such as by the insertion of one or more amino acids compared to polypeptides of a wildtype or predominant form of the ligand. Typically such isoforms are encoded by alternatively spliced variants of the gene encoding the cognate ligand. Among the ligand isoforms provided herein are those that can bind to receptors but do not initiate signal transduction or initiate a reduced level of signal transduction. Such ligand isoforms act as ligand antagonists, and also process reduced activity as agonists compared to the wildtype ligand. A ligand isoform generally lacks a domain or portion thereof sufficient to alter an activity of a wildtype full-length and/or predominant form of the ligand, and/or modulates an activity of its receptor, or lacks a structural feature such as a domain. Such ligand isoforms, also include insertions and rearrangements. A ligand isoform includes those that exhibit activities that are altered from the corresponding wild-type ligand; for example, an isoform can include an alteration in a domain of the ligand so that it is unable to induce the dimerization of a receptor. In such an example, an isoform can compete for binding with a full-length wildtype ligand for its receptor, but reduce or inhibit signaling by the receptor. Generally, an activity is altered in an isoform at least 0.1, 0.5, 1, 2, 3, 4, 5, or 10 fold compared to a wildtype and/or predominant form of a ligand. Typically, an activity is altered by at least 2, 5, 10, 20, 50, 100, or 1000 fold or more. In one embodiment, alteration of an activity by a ligand isoform is a reduction in the activity compared to the predominant form of the ligand.

[0136] As used herein, a cell surface receptor (CSR) isoform, such as an isoform of a receptor tyrosine kinase, refers to a receptor that lacks a domain or portion thereof sufficient to alter or modulate an activity compared to a wildtype and/or predominant form of the receptor, or lacks a structural feature, such as a domain. A CSR isoform can include an isoform that has one or more biological activities that are altered from the receptor; for example, an isoform can include an alteration of the extracellular domain of p185-HER2, altering the isoform from a positively acting regulatory polypeptide of the receptor to a negatively acting regulatory polypeptide of the receptor, e.g. from a receptor domain into a ligand. Generally, an activity is altered in an isoform at least 0.1, 0.5, 1, 2, 3, 4, 5, or 10 fold compared to a wildtype and/or predominant form of the receptor. Typically, an activity is altered by at least 2, 5, 10, 20, 50, 100 or 1000 fold or more. In one embodiment, alteration of an activity is a reduction in the activity.

[0137] As used herein, reference to modulating the activity of a cell surface receptor means that a CSR or ligand isoform interacts in some manner with the receptor, whereby an activity, such as, but not limited to, ligand binding, dimerization and/or other signal-transduction-related activity, is altered.

[0138] As used herein, reference to a CSR isoform or ligand isoform with altered activity refers to an alteration in an activity by virtue of the different structure or sequence of the CSR or ligand isoform compared to a cognate receptor or ligand.

[0139] As used herein, an intron fusion protein refers to an isoform that lacks one or more domain(s) or portion of one or more domain(s). In addition, an intron fusion protein is encoded by nucleic acid molecules that contain one or more codons (with reference to the predominant or wildtype form of a protein), including stop codons, operatively linked to exon codons. The intron portion can be a stop codon, resulting in an intron fusion protein that ends at the exon intron junction. The activity of an intron fusion protein typically is different from the predominant form, generally by virtue of truncation(s), deletions and/or insertion of intron(s) amino acid residues. Such activities include changes in interaction with a receptor, or indirect changes that occur virtue of differences in interaction with a co-stimulating receptor or ligand, a receptor ligand or co-factor or other modulator of receptor activity. Intron fusion proteins isolated from cells or tissues or that have the sequence of such polypeptides isolated from cells or tissues, are “natural.” Those that do not occur naturally but that are synthesized or prepared by linking a molecule to an intron are referred to as “synthetic” or “recombinant” or “combinatorial”. Included among intron fusion proteins are CSR isoforms or ligand isoforms that lack one or more domain(s) or portion of one or more domain(s) resulting in an alteration of an activity of a cognate receptor or ligand by virtue of a change in the interaction between the intron fusion protein and its receptor or ligand or other interaction. Generally such isoforms are shortened compared to a wildtype or predominant form encoded by a CSR or ligand gene. They, however, can include insertions or other modifications in the exon portion and, thus, be of the same size or larger than the predominant form. Each, however, is encoded by a nucleic acid molecule that includes at least one codon (including stop codons) from an intron-encoded portion resulting either in truncation of the CSR or ligand isoform at the end of the exon or in the addition of one 2, 3, 4, 5, 8, 10, 15, 20, 25, 30, 35, 40, 45, 50, 55, 60, 65, 70, 75 and more amino acids encoded by an intron.

[0140] An intron fusion protein can be encoded by an alternatively spliced RNA and/or can be synthetically produced such as from RNA molecules identified in silico by identifying potential splice sites and then producing such molecules by recombinant methods. Typically, an intron fusion protein is shortened by the presence of one or more stop codons in an intron fusion protein-encoding RNA that are not present in the corresponding sequence of an RNA encoding a wildtype or predominant form of a corresponding polypeptide. If an intron includes an open reading frame in-frame with the exon portion, the intron encoded portion can be inserted in the polypeptide. Addition of amino acids and/or a stop codon results in an intron fusion protein that differs in size and sequence from a wildtype or predominant form of a polypeptide.

[0141] Intron fusion proteins for purposes herein include natural, combinatorial and synthetic intron fusion proteins. A natural intron fusion protein refers to a polypeptide that is encoded by an alternatively spliced RNA molecule that contains one or more amino acids encoded by an intron linked to one or more portions of the polypeptide encoded by one or more exons of a gene. Alternatively spliced mRNA is isolated or can be prepared synthetically by joining splice donor and acceptor sites in a gene. A natural intron fusion protein contains one or more amino acids or is truncated at the exon-intron junction because the intron contains a stop codon as the first codon. The natural intron fusion proteins generally occur in cells and/or tissues. Intron fusion proteins can be produced synthetically, for example based upon the sequence encoded by a gene by identifying splice donor and acceptor sites and identifying possible encoded spliced variants. A combinatorial intron fusion protein refers to a polypeptide that is shortened compared to a wildtype or predominant form of a polypeptide. Typically, the shortening removes one or more domains or a portion thereof from a polypeptide such that an activity is altered. Combinatorial intron fusion proteins often mimic a natural intron fusion protein in that one or more domains or a portion thereof is/are deleted in a natural intron fusion protein derived from the same gene or derived from a gene in a related gene family. Those that do not occur naturally but that are synthesized or prepared by linking a molecule to an intron such that the resulting construct modulates the activity of a CSR are “synthetic.”

[0142] As used herein, natural with reference to intron fusion protein or a CSR or ligand isoform, refers to any protein, polypeptide or peptide or fragment thereof (by virtue of the presence of the appropriate splice acceptor/donor sites) that is encoded within the genome of an animal and/or is produced or generated in an animal or that could be produced from a gene. Natural intron fusion proteins include allelic variants and species variants. Intron fusion proteins can be modified post-translationally.

[0143] As used herein, an exon refers to a nucleic acid molecule containing a sequence of nucleotides that is transcribed into RNA and is represented in a mature form of RNA, such as MRNA (messenger RNA), after splicing and other RNA processing. An mRNA contains one or more exons operatively linked. Exons can encode polypeptides or a portion of a polypeptide. Exons also can contain non-translated sequences for example, translational regulatory sequences. Exon sequences are often conserved and exhibit homology among gene family members.

[0144] As used herein, an intron refers to a sequence of nucleotides that is transcribed into RNA and is then typically removed from the RNA by splicing to create a mature form of an RNA, for example, an MRNA. Typically, nucleotide sequences of introns are not incorporated into mature RNAs, nor are intron sequences or a portion thereof typically translated and incorporated into a polypeptide. Splice signal sequences such as splice donors and acceptors are used by the splicing machinery of a cell to remove introns from RNA. It is noteworthy that an intron in one splice variant can be an exon (i.e., present in the spliced transcript) in another variant. Hence, spliced mRNA encoding an intron fusion protein can include an exon(s) and introns.

[0145] As used herein, splicing refers to a process of RNA maturation where introns in the mRNA are removed and exons are operatively linked to create a messenger RNA (mRNA).

[0146] As used herein, alternative splicing refers to the process of producing multiple mRNAs from a gene. Alternate splicing can include operatively linking less than all the exons of a gene, and/or operatively linking one or more alternate exons that are not present in all transcripts derived from a gene.

[0147] As used herein, exon deletion refers to an event of alternative RNA splicing that produces a nucleic acid molecule that lacks at least one exon compared to an RNA molecule encoding a wildtype or predominant form of a polypeptide. An RNA molecule that has a deleted exon can be produced by such alternative splicing or by any other method, such as an in vitro method to delete the exon.

[0148] As used herein, exon insertion, refers to an event of alternative RNA splicing that produces a nucleic acid molecule that contains at least one exon not typically present in an RNA molecule encoding a wildtype or predominant form of a polypeptide. An RNA molecule that has an inserted exon can be produced by such alternative splicing or by any other method, such as an in vitro method to add or insert the exon.

[0149] As used herein, exon extension refers to an event of alternative RNA splicing that produces a nucleic acid molecule that contains at least one exon that is greater in length (number of nucleotides contained in the exon) than the corresponding exon in an RNA encoding a wildtype or predominant form of a polypeptide. An RNA molecule that has an extended exon can be produced by such alternative splicing or by any other method, such as an in vitro method to extend the exon. In some instances, as described herein, an mRNA produced by exon extension encodes an intron fusion protein.

[0150] As used herein, exon truncation refers to an event of alternative RNA splicing that produces a nucleic acid molecule that contains a truncation or shortening of one or more exons such that the one or more exons are shorter in length (number of nucleotides) compared to a corresponding exon in an RNA molecule encoding a wildtype or predominant form of a polypeptide. An RNA molecule that has a truncated exon can be produced by such alternative splicing or by any other method, such as an in vitro method to truncate the exon.

[0151] As used herein intron retention refers to an event of alternative RNA splicing that produces a nucleic acid molecule that contains an intron or a portion thereof operatively linked to one or more exons. An RNA molecule that retains an intron or portion thereof can be produced by such alternative splicing or by any other method, such as an in vitro method to produce an RNA molecule with a retained exon. In some cases, as described herein, an MRNA molecule produced by intron retention encodes an intron fusion protein.

[0152] As used herein, a gene, also referred to as a gene sequence, refers to a sequence of nucleotides transcribed into RNA (introns and exons), including a nucleotide sequence that encodes at least one polypeptide. A gene includes sequences of nucleotides that regulate transcription and processing of RNA. A gene also includes regulatory sequences of nucleotides such as promoters and enhancers, and translation regulation sequences.

[0153] As used herein, a splice site refers to one or more nucleotides within the gene that participate in the removal of an intron and/or the joining of an exon. Splice sites include splice acceptor sites and splice donor sites.

[0154] As used herein, an open reading frame refers to a sequence of nucleotides that encodes a functional polypeptide or a portion thereof, typically at least about fifty amino acids. An open reading frame can encode a full-length polypeptide or a portion thereof. An open reading frame can be generated by operatively linking one or more exons or an exon and intron, when the stop codon is in the intron and all or a portion of the intron is in a transcribed mRNA.

[0155] As used herein, a polypeptide refers to two or more amino acids covalently joined. The terms “polypeptide” and “protein” are used interchangeably herein.

[0156] As used herein, truncation or shortening with reference to the shortening of a nucleic acid molecule or protein, refers to a sequence of nucleotides or amino acids that is less than full-length compared to a wildtype or predominant form of the protein or nucleic acid molecule.

[0157] As used herein, a reference gene refers to a gene that can be used to map introns and exons within a gene. A reference gene can be genomic DNA or a portion thereof, that can be compared with, for example, an expressed gene sequence, to map introns and exons in the gene. A reference gene also can be a gene encoding a wildtype or predominant form of a polypeptide.

[0158] As used herein, a family or related family of proteins or genes refers to a group of proteins or genes, respectively that have homology and/or structural similarity and/or functional similarity with each other.

[0159] As used herein, a premature stop codon is a stop codon occurring in the open reading frame of a sequence before the stop codon used to produce or create a full-length form of a protein, such as a wildtype or predominant form of a polypeptide. The occurrence of a premature stop codon can be the result of, for example, alternative splicing and mutation.

[0160] As used herein, an expressed gene sequence refers to any sequence of nucleotides transcribed or predicted to be transcribed from a gene. Expressed gene sequences include, but are not limited to, cDNAs, ESTs, and in silico predictions of expressed sequences, for example, based on splice site predictions and in silico generation of spliced sequences.

[0161] As used herein, an expressed sequence tag (EST) is a sequence of nucleotides generated from an expressed gene sequence. ESTs are generated by using a population of MRNA to produce cDNA. The cDNA molecules can be produced for example, by priming from the polyA tail present on mRNAs. cDNA molecules also can be produced by random priming using one or more oligonucleotides which prime cDNA synthesis internally in mRNAs. The generated cDNA molecules are sequenced and the sequences are typically stored in a database. An example of an EST database is dbEST found online at ncbi.nlm.nih.gov/dbEST. Each EST sequence is typically assigned a unique identifier and information such as the nucleotide sequence, length, tissue type where expressed, and other associated data is associated with the identifier.

[0162] As used herein, cognate receptor with reference to the isoforms provided herein refers to the receptor that is encoded by the same gene as the particular isoform. Generally, the cognate receptor also is a predominant form in a particular cell or tissue. For example, herstatin is encoded by a splice variant of the pre-mRNA which encodes p185-HER2 (ErbB2 receptor). Thus, p185-HER2 is the cognate receptor for herstatin.

[0163] As used herein, a cognate ligand with reference to the isoforms provided herein refers to the ligand that is encoded by the same gene as the particular isoform. Generally, the cognate ligand also is a predominant form in a particular cell or tissue.

[0164] As used herein, a wildtype form, for example, a wildtype form of a polypeptide, refers to a polypeptide that is encoded by a gene. Typically a wildtype form refers to a gene (or RNA or protein derived therefrom) without mutations or other modifications that alter function or structure; wildtype forms include allelic variation among and between species.

[0165] As used herein, a predominant form, for example, a predominant form of a polypeptide, refers to a polypeptide that is the major polypeptide produced from a gene. A “predominant form” varies from source to source. For example, different cells or tissue types can produce different forms of polypeptides, for example, by alternative splicing and/or by alternative protein processing. In each cell or tissue type, a different polypeptide can be a “predominant form”.

[0166] As used herein, a domain refers to a portion (typically a sequence of three or more, generally 5 or 7 or more amino acids) of a polypeptide chain that can form an independently folded structure within a protein made up of one or more structural motifs (e.g. combinations of alpha helices and/or beta strands connected by loop regions) and/or that is recognized by virtue of a functional activity, such as kinase activity. A protein can have one, or more than one, distinct domain. For example, a domain can be identified, defined or distinguished by homology of the sequence therein to related family members, such as homology of motifs that define an extracellular domain. In another example, a domain can be distinguished by its function, such as by enzymatic activity, e.g. kinase activity, or an ability to interact with a biomolecule, such as DNA binding, ligand binding, and dimerization. A domain independently can exhibit a biological function or activity such that the domain independently or fused to another molecule can perform an activity, such as, for example proteolytic activity or ligand binding. A domain can be a linear sequence of amino acids or a non-linear sequence of amino acids from the polypeptide. Many polypeptides contain a plurality of domains. For example, receptor tyrosine kinases typically include, an extracellular domain, a membrane-spanning (transmembrane) domain and an intracellular tyrosine kinase domain.

[0167] As used herein, a polypeptide lacking all or a portion of a domain refers a polypeptide that has a deletion of one or more amino acids or all of the amino acids of a domain compared to a cognate polypeptide. Amino acids deleted in a polypeptide lacking all or part of a domain need not be contiguous amino acids within the domain of the cognate polypeptide. Polypeptides that lack all or a part of a domain can exhibit a loss or reduction of an activity of the polypeptide compared to the activity of a cognate polypeptide or loss of a structure in the polypeptide.

[0168] For example, if a cognate protein has a transmembrane domain, then an isoform polypeptide lacking all or a part of the transmembrane domain can have a deletion of 1, 2, 3, 4, 5, 6, 7, 8, 9, 10, 11, 12, 13, 14, 15, 16, 17, 18, 19, 20 or more amino acids of the amino acids corresponding to the same amino acid positions in the cognate polypeptide.

[0169] As used herein, a polypeptide that contains a domain refers to a polypeptide that contains a complete domain with reference to the corresponding domain of a cognate protein. A complete domain is determined with reference to the definition of that particular domain within a cognate polypeptide. For example, an isoform comprising a domain refers to an isoform that contains a domain corresponding to the complete domain as found in the cognate protein. If a cognate protein, for example, contains a transmembrane domain of 21 amino acids between amino acid positions 400-420, then a receptor isoform that comprises such a transmembrane domain, contains a 21 amino acid domain that has substantial identity with the 21 amino acid domain of the cognate protein. Substantial identity refers to a domain that can contain allelic variation and conservative substitutions compared to the domain of the cognate protein. Domains that are substantially identical do not have deletions, non-conservative substitutions or insertions of amino acids compared to the domain of the cognate protein.

[0170] Such domains are known to those of skill in the art who can identify such. Domains (i.e., a furin domain, an Ig-like domain) often are identified by virtue of structural and/or sequence homology to domains in particular proteins. For exemplification herein, definitions are provided, but it is understood that it is well within the skill in the art to recognize particular domains by name. If needed appropriate software can be employed to identify domains. Further, reference to the amino acids positions of a domain herein are for exemplification purposes only. Since interactions are dynamic, amino acid positions noted are for reference and exemplification. The noted positions reflects a range of loci that vary by 2, 3, 4, 5 or more amino acids. Variations also exist among allelic variants and species variants. Those of skill in the art can identify corresponding sequences by visual comparison or other comparisons including readily available algorithms and software.

[0171] As used herein, an extracellular domain is a portion of a cell surface receptor that occurs on the surface of the receptor and includes the ligand binding site(s). In one example, a receptor L domain (RLD) (also called an EGFR-like domain), such as for example in HER2, is an example of a domain that includes a ligand binding site. Each L domain contains a single-stranded right hand beta-helix that can associate with a second L domain to form a three-dimensional bilobal structure surrounding a central space of sufficient size to accommodate a ligand molecule.

[0172] As used herein, a furin domain is a domain recognized as such by those of skill in the art and is a cysteine rich region. Furin is a type 1 transmembrane serine protease. A furin domain can function as a cleavage site for a furin protease.

[0173] As used herein a Sema domain is a domain recognized as such by those of skill in the art and is a receptor recognition and binding module. The Sema domain is characterized by a conserved set of cysteine residues, which form four disulfide bonds to stabilize the structure. The Sema domain fold is a variation of a β propeller topology, with seven blades radially arranged around a central axis. Each blade contains a four-stranded antiparallel β sheet. The Sema domain uses a ‘loop and hook’ system to close the circle between the first and the last blades. The blades are constructed sequentially with an N-terminal β-strand closing the circle by providing the outermost strand of the seventh (C-terminal) blade. The β-propeller is further stabilized by an extension of the N-terminus, providing an additional, fifth β-strand on the outer edge of blade 6.

[0174] As used herein, a plexin domain is a domain recognized as such by those of skill in the art and contains a cysteine rich repeat. Plexins are receptors that as a complex interact with membrane-bound semaphorins. The plexins contain three domains with homology to c-met, the receptor for scatter factor-induced motility, but they lack the intrinsic tyrosine kinase activity of c-met. Intracellullarly, invariant arginines identify a plexin domain with homology to guanosine triphosphatase-activating proteins. A protein can contain one, or more than one, plexin domain. As described herein, the MET receptor contains a single plexin domain.

[0175] As used herein an Ig-like domain is a domain recognized as such by those of skill in the art and is a domain containing folds of beta strands forming a compact folded structure of two beta sheets stabilized by hydrophobic interactions and sandwiched together by an intra-chain disulfide bond. Ig domains differ in the number of strands in the beta sheets and are typically grouped into four types, Ig-like V-type, Ig-like C1-type, Ig-like C2-type, and I-set. In one example, an Ig-like C-type domain contains seven beta strands arranged as four-strand plus three-strand so that four beta strands form one beta sheet and three beta strands form the second beta sheet. In another example, an Ig-like V-type domain contains nine beta strands arranged as four beta strands plus five beta strands (Janeway C. A. et al. (eds): Immunobiology-the immune system in health and disease, 5th edn. New York, Garland Publishing, 2001.). In addition, some Ig-like domains cannot be classified into one of the above groups and are sometimes simply called Ig-like.

[0176] As used herein, the immunoglobulin superfamily is a heterogenic group of proteins containing immunoglobulin-like domains. Proteins of the immunoglobulin superfamily include proteins involved in the immune system such as immunoglobulins and the T cell receptors, proteins involved in cell-cell recognition in the nervous system and other tissues, and other proteins.

[0177] As used herein, a fibronectin type-III (FN3) domain is a domain recognized as such by those of skill in the art and contains a conserved β sandwich fold with one β sheet containing four strands and the other sheet containing three strands. The folded structure of an FN3 domain and an Ig-like domain are topologically very similar except the FN3 domain lacks a conserved disulfide bond. The portion of the polypeptide encoding an FN3 domain also is characterized by a short stretch of amino acids containing an Arg-Gly-Asp (RGD) that mediates interactions with cell adhesion molecules to modulate thrombosis, inflammation, and tumor metastasis.

[0178] As used herein, an IPT/TIG domain is a domain recognized as such by those of skill in the art has an immunoglobulin fold-like domain. Proteins contain one, or more than one, IPT/TIG domain. IPT/TIG domains are found in plexins, transcription factors, and extracellular regions of receptor proteins, such as for example the cell surface receptors MET and RON as described herein, that appear to regulate cell proliferation and cellular adhesion (Johnson C A et al, Journal of Medical Genetics, 40:311-319, (2003)).

[0179] As used herein, an EGF domain is a domain recognized as such by those of skill in the art and contains a repeat pattern involving a number of conserved cysteine residues which is important to the three-dimensional structure of the protein, and hence its recognition by receptors and other molecules. The EGF domain as described herein contains six cysteine residues which are involved in forming disulfide bonds. An EGF domain forms a two-stranded β sheet followed by a loop to a C-terminal short two-stranded sheet. Subdomains between the conserved cysteines vary in length. Repeats of EGF domains are typically found in the extracellular domain of membrane-bound proteins, such as for example in TEK as described herein. A variation of the EGF domain is the laminin (Lam) EGF domain which, as described herein, has eight instead of six conserved cysteines and therefore is longer than the average EGF module and contains a further disulfide bond C-terminal of the EGF-like region.

[0180] As used herein, a transmembrane domain spans the plasma membrane anchoring the receptor and generally includes hydrophobic residues.

[0181] As used herein, a cytoplasmic domain is a domain that participates in signal transduction and occurs in the cytoplasmic portion of a transmembrane cell surface receptor. In one example, the cytoplasmic domain can include a protein kinase (PK) domain. A PK domain is recognized as such by those of skill in the art and is a domain that contains a conserved catalytic core. The conserved catalytic core is recognized to have a glycine-rich stretch of residues in the vicinity of a lysine residue in the N-terminal extremity of the domain, which has been shown to be involved in ATP binding, and an aspartic acid residue in the central part of the catalytic domain, which is important for the catalytic activity of the enzyme. Typically, the PK domain can be a serine/threonine protein kinase or a tyrosine protein kinase domain depending on the substrate specificity of the receptor domain such that, for example, a protein containing a tyrosine kinase domain phosphorylates substrate proteins on tyrosine residues whereas, for example, a protein containing a serine/threonine protein kinase domain phosphorylates substrate proteins on serine or threonine residues.

[0182] As used herein, a kinase is a protein that is able to phosphorylate a molecule, typically a biomolecule, including macromolecules and small molecules. For example, the molecule can be a small molecule, or a protein. Phosphorylation includes auto- phosphorylation. Some kinases have constitutive kinase activity. Other kinases require activation. For example, many kinases that participate in signal transduction are phosphorylated. Phosphorylation activates their kinase activity on another biomolecule in a pathway. Some kinases are modulated by a change in protein structure and/or interaction with another molecule. For example, complexation of a protein or binding of a molecule to a kinase can activate or inhibit kinase activity.

[0183] As used herein, designated refers to the selection of a molecule or portion thereof as a point of reference or comparison. For example, a domain can be selected as a designated domain for the purpose of constructing polypeptides that are modified within the selected domain. In another example, an intron can be selected as a designated intron for the purpose of identifying RNA transcripts that include or exclude the selected intron.

[0184] As used herein, production with reference to a polypeptide refers to expression and recovery of an expressed protein (or recoverable or isolatable expressed protein). Factors that can influence the production of a protein include the expression system and host cell chosen, the cell culture conditions, the secretion of the protein by the host cell, and ability to detect a protein for purification purposes. Production of a protein can be monitored by assessing the secretion of a protein, such as for example, into cell culture medium.

[0185] As used herein, “improved production” refers to an increase in the production of a polypeptide compared to the production of a control polypeptide. For example, production of an isoform fusion protein is compared to a corresponding isoform that is not a fusion protein or that contains a different fusion. For example, the production of an isoform containing a tPA pre/prosequence can be compared to an isoform containing its endogenous signal sequence. Generally, production of a protein can be improved more than, about or at least 1, 1.5, 2, 3, 4, 5, 6, 7, 8, 9 10 fold and more. Typically, production of a protein can be improved by 5, 10, 20, 30, 40, 50 fold or more compared to a corresponding isoform that is not an isoform fusion or does not contain the same fusion.

[0186] As used herein, secretion refers to the process by which a protein is transported into the external cellular environment or, in the case of gram-negative bacteria, into the periplasmic space. Generally, secretion occurs through a secretory pathway in a cell, for example, in eukaryotic cells this involves the endoplasmic reticulum and golgi apparatus.

[0187] As used herein, a “precursor sequence” or “precursor peptide” or “precursor polypeptide” refers to a sequence of amino acids, that is processed, and that occurs at a terminus, typically at the amino terminus, of a polypeptide prior to processing or cleavage. The precursor sequence includes sequences of amino acids that effect secretion and/or trafficking of the linked polypeptide. The precursor sequence can include one or more functional portions. For example, it can include a presequence (a signal polypeptide) and/or a pro sequence. Processing of a polypeptide into a mature polypeptide results in the cleavage of a precursor sequence from a polypeptide. The precursor sequence, when it includes a presequence and a prosequence also can be referred to as a pre/prosequence.

[0188] As used herein, a “presequence”, “signal sequence”, “signal peptide”, “leader sequence” or “leader peptide” refers to a sequence of amino acids at the amino terminus of nascent polypeptides, which target proteins to the secretory pathway and are cleaved from the nascent chain once translocated in the endoplasmic reticulum membrane.

[0189] As used herein, a prosequence refers to a sequence encoding a propeptide which when it is linked to a polypeptide can exhibit diverse regulatory functions including, but not limited to, contributing to the correct folding and formation of disulfide bonds of a mature polypeptide, contributing to the activation of a polypeptide upon cleavage of the pro-peptide, and/or contributing as recognition sites. Generally, a pro-sequence is cleaved off within the cell before secretion, although it can also be cleaved extracellularly by exoproteases. In some examples, a pro-sequence is autocatalytically cleaved while in other examples another polypeptide protease cleaves a pro-sequence.

[0190] As used herein, homologous refers to a molecule, such as a nucleic acid molecule or polypeptide, from different species that correspond to each other and that are identical or very similar to each other (i.e., are homologs).

[0191] As used herein, heterologous refers to a molecule, such as a nucleic acid or polypeptide, that is unique in activity or sequence. A heterologous molecule can be derived from a separate genetic source or species. For purposes herein, a heterologous molecule is a protein or polypeptide, regardless of origin, other than a CSR or ligand isoform, or allelic variants thereof. Thus, molecules heterologous to a CSR or ligand isoform include any molecule containing a sequence that is not derived from, endogenous to, or homologous to the sequence of a CSR or ligand isoform. Examples of heterologous molecules of interest herein include secretion signals from a different polypeptide of the same or different species, a tag such as a fusion tag or label, or all or part of any other molecule that is not homologous to and whose sequence is not the same as that of a CSR isoform or ligand. A heterologous molecule can be fused to a nucleic acid or polypeptide sequence of interest for the generation of a fusion or chimeric molecule.

[0192] As used herein, a heterologous secretion signal refers to the a signal sequence from a polypeptide, from the same or different species, that is different in sequence from the signal sequence of a CSR or ligand isoform. A heterologous secretion signal can be used in a host cell from which it is derived or it can be used host cells that differ from the cells from which the signal sequence is derived.

[0193] As used herein, an endogenous precursor sequence or endogenous signal sequence refers to the naturally occurring signal sequence associated with all or part of a polypeptide. The approximate location of exemplary signal sequence of various CSR and ligand isoforms, based on their corresponding cognate receptor or ligand signal sequence, are provided such as in Table 3 and 4. The C-terminal boundary of a signal peptide may vary, however, typically by no more than about 5 amino acids on either side of the signal peptide C-terminal boundary. Algorithms are available and known to one of skill in the art to identify signal sequences and predict their cleavage site (see e.g., Chou et al., (2001), Proteins 42:136; McGeoch et al., (1985) Virus Res. 3:271; von Heijne et al., (1986) Nucleic Acids Res. 14:4683).

[0194] As used herein, tissue plasminogen activator (tPA) refers to an extrinsic (tissue-type) plasminogen activator having fibrinolytic activity and typically having a structure with five domains (finger, growth factor, kringle-1, kringle-2, and protease domains). Mammalian t-PA includes t-PA from any animal, including humans. Other species include, but are not limited to, rabbit, rat, porcine, non human primate, equine, murine, dog, cat, bovine and ovine tPA. Nucleic acid encoding tPA including the precursor polypeptide(s) from human and non-human species is known in the art.

[0195] As used herein, a tPA precursor sequence refers to a sequence of amino residues that includes the presequence and prosequence from tPA (i.e., is a pre/prosequence, see e.g., U.S. Pat. Nos. 6,693,181 and 4,766,075). This polypeptide is naturally associated with tPA and acts to direct the secretion of a tPA from a cell. An exemplary precursor sequence for tPA is set forth in SEQ ID NO:2 and encoded by a nucleic acid sequence set forth in SEQ ID NO: 1. The precursor sequence includes the signal sequence (amino acids 1-23) and a prosequence (amino acids 24-35). The prosequence includes two protease cleavage sites: one after residue 32 and another after residue 35. Exemplary species variants of precursor sequences are forth in any one of SEQ ID NOS: 52-59; exemplary nucleotide and amino acid allelic variants are set forth in SEQ ID NOS:5 and 6.

[0196] As used herein, all or a portion of a tPA precursor sequence refers to any contiguous portion of amino acids of a tPA precursor sequence sufficient to direct processing and/or secretion of tPA from a cell. All or a portion of a precursor sequence can include all or a portion of a wildtype or predominant tPA precursor sequence such as set forth in SEQ ID NO:2 and encoded by SEQ ID NO: 1, allelic variants thereof set forth in SEQ ID NO: 6, or species variants set forth in SEQ ID NOS:52-59. For example, for the exemplary tPA precursor sequence set forth in SEQ ID NO:2, a portion of a tPA precursor sequence can include amino acids 1-23, or amino acids 24-35, 24-32, or amino acids 33-35, or any other contiguous sequence of amino acids 1-35 set forth in SEQ ID NO:2.

[0197] As used herein, an active portion of a polypeptide, such as with reference to an active portion of an isoform, refers to a portion of polypeptide that has an activity.

[0198] As used herein, purification of a protein refers to the process of isolating a protein, such as from a homogenate, which can contain cell and tissue components, including DNA, cell membrane and other proteins. Proteins can be purified in any of a variety of ways known to those of skill in the art, such as for example, according to their isoelectric points by running them through a pH graded gel or an ion exchange column, according to their size or molecular weight via size exclusion chromatography or by SDS-PAGE (sodium dodecyl sulfate-polyacrylamide gel electrophoresis) analysis, or according to their hydrophobicity. Other purification techniques include, but are not limited to, precipitation or affinity chromatography, including immuno-affinity chromatography, and other techniques and methods that include a combination of any of these methods. Furthermore, purification can be facilitated by including a tag on the molecule, such as a his tag for affinity purification or a detectable marker for identification.

[0199] As used herein, detection includes methods that permit visualization (by eye or equipment) of a protein. A protein can be visualized using an antibody specific to the protein. Detection of a protein can also be facilitated by fusion of a protein with a tag including an epitope tag or label.

[0200] As used herein, a “tag” refers to a sequence of amino acids, typically added to the N- or C-terminus of a polypeptide. The inclusion of tags fused to a polypeptide can facilitate polypeptide purification and/or detection.

[0201] As used herein, an epitope tag includes a sequence of amino acids that has enough residues to provide an epitope against which an antibody can be made, yet short enough so that it does not interfere with an activity of the polypeptide to which it is fused. Suitable tag polypeptides generally have at least 6 amino acid residues and usually between about 8 and 50 amino acid residues.

[0202] As used herein, a label refers to a detectable compound or composition which is conjugated directly or indirectly to an isoform so as to generate a labeled isoform. The label can be detectable by itself (e.g., radioisotope labels or fluorescent labels) or, in the case of an enzymatic label, can catalyze chemical alteration of a substrate compound composition which is then detectable. Non-limiting examples of labels included fluorogenic moieties, green fluorescent protein, or luciferase.

[0203] As used herein, a fusion tagged polypeptide refers to a chimeric polypeptide containing an isoform polypeptide fused to a tag polypeptide.

[0204] As used herein, expression refers to the process by which a gene's coded information is converted into the structures present and operating in the cell. Expressed genes include those that are transcribed into mRNA and then translated into protein and those that are transcribed into RNA but not translated into protein (e.g., transfer and ribosomal RNA). For purposes herein, a protein that is expressed can be retained inside the cells, such as in the cytoplasm, or can be secreted from the cell.

[0205] As used herein, a fusion construct refers to a nucleic acid sequence containing a coding sequence from one nucleic acid molecule and the coding sequence from another nucleic acid molecule in which the coding sequences are in the same reading frame such that when the fusion construct is transcribed and translated in a host cell, the protein is produced containing the two proteins. The two molecules can be adjacent in the construct or separated by a linker polypeptide that contains, 1, 2, 3, or more, but typically fewer than 10, 9, 8, 7, 6 amino acids. The protein product encoded by a fusion construct is referred to as a fusion polypeptide.

[0206] As used herein, a restriction enzyme linker is a linker that is encoded by a sequence of nucleotides recognized by one or more restriction enzymes As used herein, an isoform fusion protein or an isoform fusion polypeptide refers to a polypeptide encoded by a nucleic acid molecule that contains a coding sequence from an isoform, with or without an intron sequence, and a coding sequence that encodes another polypeptide, such as a precursor sequence or an epitope tag. The nucleic acids are operatively linked such that when the isoform fusion construct is transcribed and translated, an isoform fusion polypeptide is produced in which the isoform polypeptide is joined directly or via a linker to another peptide. An isoform polypeptide, typically is linked at the N-, or C-terminus, or both, to one or more other peptides.

[0207] As used herein, an allelic variant or allelic variation references to a polypeptide encoded by a gene that differs from a reference form of a gene (i.e. is encoded by an allele) among a population. Typically the reference form of the gene encodes a wildtype form and/or predominant form of a polypeptide from a population or single reference member of a species. Typically, allelic variants, have at least 80%, 90%, 95% or greater amino acid identity with a wildtype and/or predominant form from the same species.

[0208] As used herein, species variants refers to variants of the same polypeptide between and among species. Generally, interpecies allelic variants have at least about 60%, 70%, 80%, 85%, 90% or 95% identity or greater with a wildtype and/or predominant form of another species, including 96%, 97%, 98%, 99% or greater identity with a wildtype and/or predominant form of a polypeptide.

[0209] As used herein, modification refers to modification of a sequence of amino acids of a polypeptide or a sequence of nucleotides in a nucleic acid molecule and includes deletions, insertions, and replacements of amino acids and nucleotides, respectively.

[0210] As used herein, modulate and modulation refer to a change of an activity of a molecule, such as a protein. Exemplary activities include, but are not limited to, activities such as signal transduction and protein phosphorylation. Modulation can include an increase in the activity (i.e., up-regulation of an activity) a decrease in activity (i.e., down-regulation or inhibition) or any other alteration in an activity (such as in the periodicity, frequency, duration and kinetics). Modulation can be context dependent and typically modulation is compared to a designated state, for example, the wildtype protein, the protein in a constitutive state, or the protein as expressed in a designated cell type or condition.

[0211] As used herein, inhibit and inhibition refer to a reduction in an activity, such as a biological activity, relative to the uninhibited activity.

[0212] As used herein, a therapeutic protein refers to a protein used for the treatment of a condition, disease, or disorder.

[0213] As used herein, treatment means any manner in which the symptoms of a condition, disorder or disease or other indication, are ameliorated or otherwise beneficially altered.

[0214] As used herein, a disease or disorder mediated by a cognate receptor or ligand refers to any disease in which an cognate receptor or ligand plays a role, whereby modulation of its activity would effect treatment of the disease or symptom of the disease. Exemplary of cognate receptors of ligands are any provided herein including any CSR, such as RTK, a RAGE, or a TNF receptor, or a ligand such as HGF. Exemplary diseases or disorders for which a cognate receptor or ligand plays a role, such as a cognate receptor or ligand for any isoform provided herein, include but are not limited to angiogenesis-related diseases and conditions including ocular diseases, atherosclerosis, cancer and vascular injuries; neurodegenerative diseases, including Alzheimer's disease; inflammatory diseases and conditions, including atherosclerosis and Rhematoid Arthritis; diseases and conditions associated with cell proliferation including cancers, and smooth muscle cell-associated conditions; and various autoimmune diseases.

[0215] As used herein therapeutic effect means an effect resulting from treatment of a subject that alters, typically improves or ameliorates, the symptoms of a disease or condition or that cures a disease or condition. A therapeutically effective amount refers to the amount of a composition, molecule or compound which results in a therapeutic effect following administration to a subject.

[0216] As used herein, the term “subject” refers to animals, including mammals, such as human beings.

[0217] As used herein, a patient refers to a human subject.

[0218] As used herein, an activity refers to a function or functioning or changes in or interactions of a biomolecule, such as polypeptide. Exemplary, but not limiting of such activities are: complexation, dimerization, multimerization, receptor-associated kinase activity or other enzymatic or catalytic activity, receptor-associated protease activity, phosphorylation, dephosphorylation, autophosphorylation, ability to form complexes with other molecules, ligand binding, catalytic or enzymatic activity, activation including auto-activation and activation of other polypeptides, inhibition or modulation of another molecule's function, stimulation or inhibition of signal transduction and/or cellular responses such as cell proliferation, migration, differentiation, and growth, degradation, membrane localization, membrane binding, and oncogenesis. An activity can be assessed by assays described herein and by any suitable assays known to those of skill in the art, including, but not limited to, in vitro assays, including cell-based assays, in vivo assays, including assays in animal models for particular diseases. Biological activities refer to activities exhibited in vivo. For purposes herein, biological activity refers to any of the activities exhibited by a polypeptide provided herein.

[0219] As used herein, angiogenic diseases (or angiogenesis-related diseases) are diseases in which the balance of angiogenesis is altered or the timing thereof is altered. Angiogenic diseases include those in which an alteration of angiogenesis, such as undesirable vascularization, occurs. Such diseases include, but are not limited to cell proliferative disorders, including cancers, diabetic retinopathies and other diabetic complications, inflammatory diseases, endometriosis and other diseases in which excessive vascularization is part of the disease process, including those noted above.

[0220] As used herein, complexation refers to the interaction of two or more molecules such as two molecules of a protein to form a complex. The interaction can be by noncovalent and/or covalent bonds and includes, but is not limited to, hydrophobic and electrostatic interactions, Van der Waals forces and hydrogen bonds. Generally, protein- protein interactions involve hydrophobic interactions and hydrogen bonds. Complexation can be influenced by environmental conditions such as temperature, pH, ionic strength and pressure, as well as protein concentrations.

[0221] As used herein, dimerization refers to the interaction of two molecules of the same type, such as two molecules of a receptor. Dimerization includes homodimerization where two identical molecules interact. Dimerization also includes heterodimerization of two different molecules, such as two subunits of a receptor and dimerization of two different receptor molecules. Typically, dimerization involves two molecules that interact with each other through interaction of a dimerization domain contained in each molecule.

[0222] As used herein, a ligand antagonist refers to the activity of a CSR or ligand isoform that antagonizes an activity that results from ligand interaction with a CSR.

[0223] As used herein, in silico refers to research and experiments performed using a computer. In silico methods include, but are not limited to, molecular modeling studies, biomolecular docking experiments, and virtual representations of molecular structures and/or processes, such as molecular interactions.

[0224] As used herein, biological sample refers to any sample obtained from a living or viral source or other source of macromolecules and biomolecules, and includes any cell type or tissue of a subject from which nucleic acid or protein or other macromolecule can be obtained. The biological sample can be a sample obtained directly from a biological source or a sample that is processed For example, isolated nucleic acids that are amplified constitute a biological sample. Biological samples include, but are not limited to, body fluids, such as blood, plasma, serum, cerebrospinal fluid, synovial fluid, urine and sweat, tissue and organ samples from animals and plants and processed samples derived therefrom. Also included are soil and water samples and other environmental samples, viruses, bacteria, fungi, algae, protozoa and components thereof.

[0225] As used herein, the term “nucleic acid” refers to single-stranded and/or double-stranded polynucleotides such as deoxyribonucleic acid (DNA), and ribonucleic acid (RNA) as well as analogs or derivatives of either RNA or DNA. Also included in the term “nucleic acid” are analogs of nucleic acids such as peptide nucleic acid (PNA), phosphorothioate DNA, and other such analogs and derivatives or combinations thereof. Nucleic acid can refer to polynucleotides such as deoxyribonucleic acid (DNA) and ribonucleic acid (RNA). The term also includes, as equivalents, derivatives, variants and analogs of either RNA or DNA made from nucleotide analogs, single (sense or antisense) and double-stranded polynucleotides. Deoxyribonucleotides include deoxyadenosine, deoxycytidine, deoxyguanosine and deoxythymidine. For RNA, the uracil base is uridine.

[0226] As used herein, “nucleic acid molecule encoding” refers to a nucleic acid molecule which directs the expression of a specific protein or peptide. The nucleic acid sequences include both the DNA strand sequence that is transcribed into RNA and the RNA sequence that is translated into protein or peptide. The nucleic acid molecule includes both the full length nucleic acid sequences as well as non-full length sequences derived from the full length mature polypeptide, such as for example a full length polypeptide lacking a precursor sequence. For purposes herein, a nucleic acid sequence also includes the degenerate codons of the native sequence or sequences which may be introduced to provide codon preference in a specific host.

[0227] As used herein, the term “polynucleotide” refers to an oligomer or polymer containing at least two linked nucleotides or nucleotide derivatives, including a deoxyribonucleic acid (DNA), a ribonucleic acid (RNA), and a DNA or RNA derivative containing, for example, a nucleotide analog or a “backbone” bond other than a phosphodiester bond, for example, a phosphotriester bond, a phosphoramidate bond, a phophorothioate bond, a thioester bond, or a peptide bond (peptide nucleic acid). The term “oligonucleotide” also is used herein essentially synonymously with “polynucleotide,” although those in the art recognize that oligonucleotides, for example, PCR primers, generally are less than about fifty to one hundred nucleotides in length.

[0228] Polynucleotides can include nucleotide analogs, including, for example, mass modified nucleotides, which allow for mass differentiation of polynucleotides; nucleotides containing a detectable label such as a fluorescent, radioactive, luminescent or chemiluminescent label, which allow for detection of a polynucleotide; or nucleotides containing a reactive group such as biotin or a thiol group, which facilitates immobilization of a polynucleotide to a solid support. A polynucleotide also can contain one or more backbone bonds that are selectively cleavable, for example, chemically, enzymatically or photolytically. For example, a polynucleotide can include one or more deoxyribonucleotides, followed by one or more ribonucleotides, which can be followed by one or more deoxyribonucleotides, such a sequence being cleavable at the ribonucleotide sequence by base hydrolysis. A polynucleotide also can contain one or more bonds that are relatively resistant to cleavage, for example, a chimeric oligonucleotide primer, which can include nucleotides linked by peptide nucleic acid bonds and at least one nucleotide at the 3′ end, which is linked by a phosphodiester bond or other suitable bond, and is capable of being extended by a polymerase. Peptide nucleic acid sequences can be prepared using well-known methods (see, for example, Weiler et al. Nucleic acids Res. 25: 2792-2799 (1997)).

[0229] As used herein, synthetic, in the context of a synthetic sequence and synthetic gene refers to a nucleic acid molecule that is produced by recombinant methods and/or by chemical synthesis methods.

[0230] As used herein, oligonucleotides refer to polymers that include DNA, RNA, nucleic acid analogues, such as PNA, and combinations thereof. For purposes herein, primers and probes are single-stranded oligonucleotides or are partially single-stranded oligonucleotides.

[0231] As used herein, primer refers to an oligonucleotide containing two or more deoxyribonucleotides or ribonucleotides, generally more than three, from which synthesis of a primer extension product can be initiated. Experimental conditions conducive to synthesis include the presence of nucleoside triphosphates and an agent for polymerization and extension, such as DNA polymerase, and a suitable buffer, temperature and pH.

[0232] As used herein, production by recombinant means by using recombinant DNA methods, refers to the use of the well-known methods of molecular biology for expressing proteins encoded by cloned DNA.

[0233] As used herein, “isolated,” with reference to a molecule, such as a nucleic acid molecule, oligonucleotide, polypeptide or antibody, indicates that the molecule has been altered by the hand of man from how it is found in its natural environment. For example, a molecule produced by and/or contained within a recombinant host cell is considered “isolated”. Likewise, a molecule that has been purified, partially or substantially, from a native source or recombinant host cell, or produced by synthetic methods, is considered “isolated.” Depending on the intended application, an isolated molecule can be present in any form, such as in an animal, cell or extract thereof; dehydrated, in vapor, solution or suspension; or immobilized on a solid support.

[0234] As used herein, the term “vector” refers to a nucleic acid molecule capable of transporting another nucleic acid to which it has been linked. For example, a vector refers to viral expression systems, autonomous self-replicating circular DNA (plasmids), and includes expression and nonexpression plasmids. One type of vector also can be an episome, i.e., a nucleic acid capable of extra chromosomal replication. Vectors include those capable of autonomous replication and/or expression of nucleic acids to which they are linked. Vectors capable of directing the expression of genes to which they are operatively linked are referred to herein as “expression vectors”. In general, expression vectors are often in the form of “plasmids”, which are generally circular double stranded DNA loops that, in their vector form, are not bound to the chromosome. “Plasmid” and “vector” are used interchangeably as the plasmid is the most commonly used form of vector. Other forms of expression vectors include those that serve equivalent functions and that become known in the art subsequently hereto. Where a recombinant microorganism or cell is described as hosting an “expression vector”, this includes both extrachromosomal circular DNA and DNA that has been incorporated into the host chromosome(s). Where a vector is being maintained by a host cell, the vector may either be stably replicated by the cells during mitosis as an autonomous structure, or the vector may be incorporated within the host's genome.

[0235] As used herein, a reporter gene construct is a nucleic acid molecule that includes a nucleic acid encoding a reporter operatively linked to transcriptional control sequences. Transcription of the reporter gene is controlled by these sequences. The activity of at least one or more of these control sequences is directly or indirectly regulated by another molecule such as a cell surface protein, a protein or small molecule involved in signal transduction within the cell. The transcriptional control sequences include the promoter and other regulatory regions, such as enhancer sequences, that modulate the activity of the promoter, or control sequences that modulate the activity or efficiency of the RNA polymerase. Such sequences are herein collectively referred to as transcriptional control elements or sequences. In addition, the construct can include sequences of nucleotides that alter translation of the resulting mRNA, thereby altering the amount of reporter gene product.

[0236] As used herein, “reporter” or “reporter moiety” refers to any moiety that allows for the detection of a molecule of interest, such as a protein expressed by a cell, or a biological particle. Typical reporter moieties include, for example, fluorescent proteins, such as red, blue and green fluorescent proteins (see, e.g., U.S. Pat. No. 6,232,107, which provides GFPs from Renilla species and other species), the lacZ gene from E. coli, alkaline phosphatase, chloramphenicol acetyl transferase (CAT) and other such well-known genes. For expression in cells, nucleic acid encoding the reporter moiety, referred to herein as a “reporter gene”, can be expressed as a fusion protein with a protein of interest or under to the control of a promoter of interest.

[0237] As used herein, the phrase “operatively linked” with reference to sequences of nucleic acids means the nucleic acid molecules or segments thereof are covalently joined into one piece of nucleic acid such as DNA or RNA, whether in single or double stranded form. The segments are not necessarily contiguous, rather two or more components are juxtaposed so that the components are in a relationship permitting them to function in their intended manner. For example, segments of RNA (exons) can be operatively linked such as by splicing, to form a single RNA molecule. In another example, DNA segments can be operatively linked, whereby control or regulatory sequences on one segment permit expression or replication or other such control of other segments. Thus, in the case of a regulatory region operatively linked to a reporter or any other polynucleotide, or a reporter or any polynucleotide operatively linked to a regulatory region, expression of the polynucleotide/reporter is influenced or controlled (e.g., modulated or altered, such as increased or decreased) by the regulatory region. For gene expression, a sequence of nucleotides and a regulatory sequence(s) are connected in such a way to control or permit gene expression when the appropriate molecular signal, such as transcriptional activator proteins, are bound to the regulatory sequence(s). Operative linkage of heterologous nucleic acid, such as DNA, to regulatory and effector sequences of nucleotides, such as promoters, enhancers, transcriptional and translational stop sites, and other signal sequences, refers to the relationship between such DNA and such sequences of nucleotides. For example, operative linkage of heterologous DNA to a promoter refers to the physical relationship between the DNA and the promoter such that the transcription of such DNA is initiated from the promoter by an RNA polymerase that specifically recognizes, binds to and transcribes the DNA in reading frame.

[0238] As used herein, the term “operatively linked” with reference to amino acids in polypeptides refers to covalent linkage (direct or indirect) of the amino acids. For example, when used in the context of the phrase “at least one domain of a cell surface receptor operatively linked to at least one amino acid encoded by an intron of a gene encoding a cell surface receptor”, means that the amino acids of a domain from a cell surface receptor are covalently joined to amino acids encoded by an intron from a cell surface receptor gene. Such linkage, typically direct via peptide bonds, also can be effected indirectly, such as via a linker or via non-peptidic linkage. Hence, a polypeptide that contains at least one domain of a cell surface receptor operatively linked to at least one amino acid encoded by an intron of a gene encoding a cell surface receptor can be an intron fusion protein. It contains one or more amino acids that are not found in a predominant form of the receptor, but rather, contains a portion that is encoded by an intron of the gene that encodes the predominant form. These one or more amino acids are encoded by an intron sequence of the gene encoding the cell surface receptor. Nucleic acids encoding such polypeptides can be produced when an intron sequence is spliced or otherwise covalently joined in-frame to an exon sequence that encodes a domain of a cell surface receptor. Translation of the nucleic acid molecule produces a polypeptide where the amino acid(s) of the intron sequence are covalently joined to a domain of the cell surface receptor. They also can be produced synthetically by linking a portion containing an exon to a portion containing an intron, including chimeric intron fusion proteins in which the exon is encoded by a gene for a different cell surface receptor isoform from the intron portion.

[0239] As used herein, the phrase “generated from a nucleic acid” in reference to the generating of a polypeptide, such as an isoform and intron fusion protein, includes the literal generation of a polypeptide molecule and the generation of an amino acid sequence of a polypeptide from translation of the nucleic acid sequence into a sequence of amino acids.

[0240] As used herein, a promoter region refers to the portion of DNA of a gene that controls transcription of the DNA to which it is operatively linked. The promoter region includes specific sequences of DNA that are sufficient for RNA polymerase recognition, binding and transcription initiation. This portion of the promoter region is referred to as the promoter. In addition, the promoter region includes sequences that modulate this recognition, binding and transcription initiation activity of the RNA polymerase. These sequences can be cis acting or can be responsive to trans acting factors. Promoters, depending upon the nature of the regulation, can be constitutive or regulated.

[0241] As used herein, regulatory region means a cis-acting nucleotide sequence that influences expression, positively or negatively, of an operatively linked gene. Regulatory regions include sequences of nucleotides that confer inducible (i.e., require a substance or stimulus for increased transcription) expression of a gene. When an inducer is present or at increased concentration, gene expression can be increased. Regulatory regions also include sequences that confer repression of gene expression (i.e., a substance or stimulus decreases transcription). When a repressor is present or at increased concentration gene expression can be decreased. Regulatory regions are known to influence, modulate or control many in vivo biological activities including cell proliferation, cell growth and death, cell differentiation and immune modulation. Regulatory regions typically bind to one or more trans-acting proteins, which results in either increased or decreased transcription of the gene.

[0242] Particular examples of gene regulatory regions are promoters and enhancers. Promoters are sequences located around the transcription or translation start site, typically positioned 5′ of the translation start site. Promoters usually are located within 1 Kb of the translation start site, but can be located further away, for example, 2 Kb, 3 Kb, 4 Kb, 5 Kb or more, up to and including 10 Kb. Enhancers are known to influence gene expression when positioned 5′ or 3 of the gene, or when positioned in or a part of an exon or an intron. Enhancers also can function at a significant distance from the gene, for example, at a distance from about 3 Kb, 5 Kb, 7 Kb, 10 Kb, 15 Kb or more.

[0243] Regulatory regions also include, in addition to promoter regions, sequences that facilitate translation, splicing signals for introns, maintenance of the correct reading frame of the gene to permit in-frame translation of mRNA and, stop codons, leader sequences and fusion partner sequences, internal ribosome binding site (IRES) elements for the creation of multigene, or polycistronic, messages, polyadenylation signals to provide proper polyadenylation of the transcript of a gene of interest and stop codons, and can be optionally included in an expression vector.

[0244] As used herein, the “amino acids,” which occur in the various amino acid sequences appearing herein, are identified according to their well-known, three-letter or one-letter abbreviations (see Table 1). The nucleotides, which occur in the various DNA fragments, are designated with the standard single-letter designations used routinely in the art.

[0245] As used herein, “amino acid residue” refers to an amino acid formed upon chemical digestion (hydrolysis) of a polypeptide at its peptide linkages. The amino acid residues described herein are generally in the “L” isomeric form. Residues in the “D” isomeric form can be substituted for any L-amino acid residue, as long as the desired functional property is retained by the polypeptide. NH2 refers to the free amino group present at the amino terminus of a polypeptide. COOH refers to the free carboxy group present at the carboxyl terminus of a polypeptide. In keeping with standard polypeptide nomenclature described in J. Biol. Chem., 243:3552-59 (1969) and adopted at 37 C.F.R. §§ 1.821-1.822, abbreviations for amino acid residues are shown in Table 1:

TABLE 1
Table of Correspondence

SYMBOL

| 1-Letter | 3-Letter | AMINO ACID |
|---|---|---|
| Y | Tyr | tyrosine |
| G | Gly | glycine |
| F | Phe | phenylalanine |
| M | Met | methionine |
| A | Ala | alanine |
| S | Ser | serine |
| I | Ile | isoleucine |
| L | Leu | leucine |
| T | Thr | threonine |
| V | Val | valine |
| P | Pro | proline |
| K | Lys | lysine |
| H | His | Histidine |
| Q | Gln | Glutamine |
| E | Glu | glutamic acid |
| Z | Glx | Glu and/or Gln |
| W | Trp | Tryptophan |
| R | Arg | Arginine |
| D | Asp | aspartic acid |
| N | Asn | Asparagines |
| B | Asx | Asn and/or Asp |
| C | Cys | Cysteine |
| X | Xaa | Unknown or other |

[0246] All sequences of amino acid residues represented herein by a formula have a left to right orientation in the conventional direction of amino-terminus to carboxyl-terminus. In addition, the phrase “amino acid residue” is defined to include the amino acids listed in the Table of Correspondence modified, non-natural and unusual amino acids. Furthermore, it should be noted that a dash at the beginning or end of an amino acid residue sequence indicates a peptide bond to a further sequence of one or more amino acid residues or to an amino-terminal group such as NH₂ or to a carboxyl-terminal group such as COOH.

[0247] In a peptide or protein, suitable conservative substitutions of amino acids are known to those of skill in this art and generally can be made without altering a biological activity of a resulting molecule. Those of skill in this art recognize that, in general, single amino acid substitutions in non-essential regions of a polypeptide do not substantially alter biological activity (see, e.g., Watson et al. Molecular Biology of the Gene, 4th Edition, 1987, The Benjamin/Curmmings Pub. co., p.224).

[0248] Such substitutions may be made in accordance with those set forth in TABLE 2 as follows:

TABLE 2

| Original residue | Conservative substitution |
|---|---|
| Ala (A) | Gly; Ser |
| Arg (R) | Lys |
| Asn (N) | Gln; His |
| Cys (C) | Ser |
| Gln (Q) | Asn |
| Glu (E) | Asp |
| Gly (G) | Ala; Pro |
| His (H) | Asn; Gln |
| Ile (I) | Leu; Val |
| Leu (L) | Ile; Val |
| Lys (K) | Arg; Gln; Glu |
| Met (M) | Leu; Tyr; Ile |
| Phe (F) | Met; Leu; Tyr |
| Ser (S) | Thr |
| Thr (T) | Ser |
| Trp (W) | Tyr |
| Tyr (Y) | Trp; Phe |
| Val (V) | Ile; Leu |

Other substitutions also are permissible and can be determined empirically or in accord with other known conservative or non-conservative substitutions.

[0249] As used herein, “similarity” between two proteins or nucleic acids refers to the relatedness between the sequence of amino acids of the proteins or the nucleotide sequences of the nucleic acids. Similarity can be based on the degree of identity and/or homology of sequences of residues and the residues contained therein. Methods for assessing the degree of similarity between proteins or nucleic acids are known to those of skill in the art. For example, in one method of assessing sequence similarity, two amino acid or nucleotide sequences are aligned in a manner that yields a maximal level of identity between the sequences. “Identity” refers to the extent to which the amino acid or nucleotide sequences are invariant. Alignment of amino acid sequences, and to some extent nucleotide sequences, also can take into account conservative differences and/or frequent substitutions in amino acids (or nucleotides). Conservative differences are those that preserve the physico-chemical properties of the residues involved. Alignments can be global (alignment of the compared sequences over the entire length of the sequences and including all residues) or local (the alignment of a portion of the sequences that includes only the most similar region or regions).

[0250] As used herein, the terms “homology” and “identity” are used interchangeably, but homology for proteins can include conservative amino acid changes. In general, to identify corresponding positions the sequences of amino acids are aligned so that the highest order match is obtained (see, e.g. Computational Molecular Biology, Lesk, A. M., ed., Oxford University Press, New York, 1988; Biocomputing: Informatics and Genome Projects, Smith, D. W., ed., Academic Press, New York, 1993; Computer Analysis of Sequence Data, Part I, Griffin, A. M., and Griffin, H. G., eds., Humana Press, New Jersey, 1994; Sequence Analysis in Molecular Biology, von Heinje, G., Academic Press, 1987; and Sequence Analysis Primer, Gribskov, M. and Devereux, J., eds., M Stockton Press, New York, 1991; Carrillo et al. (1988) SIAM J Applied Math 48:1073).

[0251] As use herein, “sequence identity” refers to the number of identical amino acids (or nucleotide bases) in a comparison between a test and a reference polypeptide or polynucleotide. Homologous polypeptides refer to a pre-determined number of identical or homologous amino acid residues. Homology includes conservative amino acid substitutions as well identical residues. Sequence identity can be determined by standard alignment algorithm programs used with default gap penalties established by each supplier. Homologous nucleic acid molecules refer to a pre-determined number of identical or homologous nucleotides. Homology includes substitutions that do not change the encoded amino acid (i.e., “silent substitutions”) as well identical residues. Substantially homologous nucleic acid molecules hybridize typically at moderate stringency or at high stringency all along the length of the nucleic acid or along at least about 70%, 80% or 90% of the fill-length nucleic acid molecule of interest. Also contemplated are nucleic acid molecules that contain degenerate codons in place of codons in the hybridizing nucleic acid molecule. (For determination of homology of proteins, conservative amino acids can be aligned as well as identical amino acids; in this case, percentage of identity and percentage homology vary). Whether any two nucleic acid molecules have nucleotide sequences (or any two polypeptides have amino acid sequences) that are at least 60%, 70%, 80%, 85%, 90%, 95%, 96%, 97%, 98% or 99% “identical” can be determined using known computer algorithms such as the “FAST A” program, using for example, the default parameters as in Pearson et al. Proc. Natl. Acad. Sci. USA 85: 2444 (1988) (other programs include the GCG program package (Devereux, J., et al., Nucleic Acids Research 12(I): 387 (1984)), BLASTP, BLASTN, FASTA (Altschul, S. F., et al., J Molec. Biol. 215:403 (1990); Guide to Huge Computers, Martin J. Bishop, ed., Academic Press, San Diego (1994), and Carrillo et al. SIAM J Applied Math 48: 1073 (1988)). For example, the BLAST function of the National Center for Biotechnology Information database can be used to determine identity. Other commercially or publicly available programs include, DNAStar “MegAlign” program (Madison, WI) and the University of Wisconsin Genetics Computer Group (UWG) “Gap” program (Madison Wis.)). Percent homology or identity of proteins and/or nucleic acid molecules can be determined, for example, by comparing sequence information using a GAP computer program (e.g., Needleman et al. J Mol. Biol. 48: 443 (1970), as revised by Smith and Waterman (Adv. Appl. Math. 2: 482 (1981)). Briefly, a GAP program defines similarity as the number of aligned symbols (i.e., nucleotides or amino acids) which are similar, divided by the total number of symbols in the shorter of the two sequences. Default parameters for the GAP program can include: (1) a unary comparison matrix (containing a value of 1 for identities and 0 for non identities) and the weighted comparison matrix of Gribskov et al. Nucl. Acids Res. 14: 6745 (1986), as described by Schwartz and Dayhoff, eds., Atlas of Protein Sequence and Structure, National Biomedical Research Foundation, pp. 353-358 (1979); (2) a penalty of 3.0 for each gap and an additional 0.10 penalty for each symbol in each gap; and (3) no penalty for end gaps. Therefore, as used herein, the term “identity” represents a comparison between a test and a reference polypeptide or polynucleotide. In one non-limiting example, “at least 90% identical to” refers to percent identities from 90 to 100% relative to the reference polypeptides. Identity at a level of 90% or more is indicative of the fact that, assuming for exemplification purposes a test and reference polynucleotide length of 100 amino acids are compared, no more than 10% (i.e., 10 out of 100) of amino acids in the test polypeptide differs from that of the reference polypeptides. Similar comparisons can be made between a test and reference polynucleotides. Such differences can be represented as point mutations randomly distributed over the entire length of an amino acid sequence or they can be clustered in one or more locations of varying length up to the maximum allowable, e.g., 10/100 amino acid difference (approximately 90% identity). Differences are defined as nucleic acid or amino acid substitutions, insertions or deletions. At the level of homologies or identities above about 85-90%, the result should be independent of the program and gap parameters set; such high levels of identity can be assessed readily, often without relying on software.

[0252] As used herein, an aligned sequence refers to the use of homology (similarity and/or identity) to align corresponding positions in a sequence of nucleotides or amino acids. Typically, two or more sequences that are related by 50% or more identity are aligned. An aligned set of sequences refers to 2 or more sequences that are aligned at corresponding positions and can include aligning sequences derived from RNAs, such as ESTs and other cDNAs, aligned with genomic DNA sequence.

[0253] As used herein, “primer” refers to a nucleic acid molecule that can act as a point of initiation of template-directed DNA synthesis under appropriate conditions (e.g., in the presence of four different nucleoside triphosphates and a polymerization agent, such as DNA polymerase, RNA polymerase or reverse transcriptase) in an appropriate buffer and at a suitable temperature. It will be appreciated that certain nucleic acid molecules can serve as a “probe” and as a “primer.” A primer, however, has a 3′ hydroxyl group for extension. A primer can be used in a variety of methods, including, for example, polymerase chain reaction (PCR), reverse-transcriptase (RT)-PCR, RNA PCR, LCR, multiplex PCR, panhandle PCR, capture PCR, expression PCR, 3′and 5′RACE, in situ PCR, ligation-mediated PCR and other amplification protocols.

[0254] As used herein, “primer pair” refers to a set of primers that includes a 5′ (upstream) primer that hybridizes with the 5′ end of a sequence to be amplified (e.g. by PCR) and a 3′ (downstream) primer that hybridizes with the complement of the 3′ end of the sequence to be amplified.

[0255] As used herein, “specifically hybridizes” refers to annealing, by complementary base-pairing, of a nucleic acid molecule (e.g. an oligonucleotide) to a target nucleic acid molecule. Those of skill in the art are familiar with in vitro and in vivo parameters that affect specific hybridization, such as length and composition of the particular molecule. Parameters particularly relevant to in vitro hybridization further include annealing and washing temperature, buffer composition and salt concentration. Exemplary washing conditions for removing non-specifically bound nucleic acid molecules at high stringency are 0.1×SSPE, 0.1% SDS, 65° C., and at medium stringency are 0.2×SSPE, 0.1% SDS, 50° C. Equivalent stringency conditions are known in the art. The skilled person can readily adjust these parameters to achieve specific hybridization of a nucleic acid molecule to a target nucleic acid molecule appropriate for a particular application.

B. Cell Surface Receptor and Ligand Isoforms

[0256] Provided herein are nucleic acids encoding cell surface receptor (CSR) isoforms or ligand isoforms fused to another nucleic acid that alters the production of a CSR isoform, such as by altering secretion, expression, and/or purification of a CSR or ligand isoform. The isoform fusion results in a polypeptide that has improved secretion and expression compared to an isoform that is not a fusion with another nucleic acid sequence. Also provided herein are expression vectors containing nucleic acid encoding an isoform as provided herein, and cells containing such vectors.

[0257] The isoforms exemplified herein represent variants of a predominant or wildtype gene that can be generated by alternate splicing or by recombinant or synthetic (e.g., in silico and/or chemical synthesis) methods. The isoforms are described in related applications (copending U.S. application Ser. No. 10/846,113 and corresponding International PCT application No. WO 05/016966, U.S. application Ser. No. 11/129,740, U.S. Provisional application No. 60/678,076, and U.S. application No. (Attorney Docket No. 17118-045P01/P2824), which, as all such documents, are incorporated by reference in their entirety). Typically, an isoform produced from an alternatively spliced RNA is not a predominant form of a polypeptide encoded by a gene. In some instances, an isoform can be a tissue-specific or developmental stage-specific polypeptide or disease-specific (i.e., can be expressed at a different level from tissue-to-tissue or stage-to-stage or in a diseased state compared to a non-diseased state or only can be expressed in the tissue, at the stage or during the disease process or progress). Alternatively spliced RNA forms that can encode isoforms include, but are not limited to, exon deletion, exon retention, exon extension, exon truncation, and intron retention alternatively spliced RNAs. Generally, an isoform provided herein is generated by intron modification.

[0258] Isoforms generated by alternative splicing of encoding nucleic molecules include intron fusion proteins, whereby one or more codons (including stop codons) from one or more introns is/are retained compared to an mRNA transcript encoding a wildtype or predominant form of an isoform. The retention of one or more intron codons can generate transcripts encoding isoforms that are shortened compared to a wildtype or predominant form of an isoform. A retained intron sequence can introduce a stop codon in the transcript and thus prematurely terminate the encoded polypeptide. A retained intron sequence also can introduce additional amino acids into an isoform polypeptide, such as the insertion of one or more codons into a transcript such that one or more amino acids are inserted into a domain of an isoform. Intron retention includes the inclusion of a full or partial intron sequence into a transcript encoding an isoform. The retained intron sequence can introduce nucleotide sequence with codons in-frame to the surrounding exons or it can introduce a frame shift into the transcript.

[0259] 1. Cell Surface Receptor Isoforms

[0260] Isoforms that are cell surface receptor isoforms can be linked to a signal sequence or to a precursor sequence as described herein or can be produced by expression of a nucleic acid construct that encodes an isoform operatively linked to a prescursor or signal sequence. CSR isoforms can contain a new domain and/or exhibit a new or different biological function compared to a wildtype and/or predominant form of the receptor. For example, intron-encoded amino acids can introduce a new domain or portion thereof into an isoform. Biological activities that can be altered include, but are not limited to, protein-protein interactions such as dimerization, multimerization and complex formation, specificity and/or affinity for ligand, cellular localization and relocalization, membrane anchoring, enzymatic activity such as kinase activity, response to regulatory molecules including regulatory proteins, cofactors, and other signaling molecules, such as in a signal transduction pathway. Generally, a biological activity is altered in an isoform at least 0.1, 0.5, 1, 2, 3, 4, 5, or 10 fold compared to a wildtype and/or predominant form of the receptor. Typically, a biological activity is altered 10, 20, 50, 100 or 1000 fold or more. For example, an isoform can be reduced in a biological activity.

[0261] CSR isoforms also can modulate an activity of a wildtype and/or predominant form of the receptor. For example, a CSR isoform can interact directly or indirectly with a CSR isoform and modulate a biological activity of the receptor. Biological activities that can be altered include, but are not limited to, protein-protein interactions such as dimerization, multimerization and complex formation, specificity and/or affinity for ligand, cellular localization and relocalization, membrane anchoring, enzymatic activity such as kinase activity, response to regulatory molecules including regulatory proteins, cofactors, and other signaling molecules, such as in a signal transduction pathway.

[0262] A CSR isoform can interact directly or indirectly with a cell surface receptor to cause or participate in a biological effect, such as by modulating a biological activity of the cell surface receptor. A CSR isoform also can interact independently of a cell surface receptor to cause a biological effect, such as by initiating or inhibiting a signal transduction pathway. For example, a CSR isoform can initiate a signal transduction pathway and enhance or promote cell growth. In another example, a CSR isoform can interact with the cell surface receptor as a ligand causing a biological effect, for example by inhibiting a signal transduction pathway that can impede or inhibit cell growth. Hence, the isoforms provided herein can function as cell surface receptor ligands in that they interact with the targeted receptor in the same manner that a cognate ligand interacts with and alters receptor activity. The isoforms can bind as a ligand, but not necessarily, to a ligand binding site and serve to block receptor dimerization. They act as ligands in that they interact with the receptor. The CSR isoforms also can act by binding to ligands for the receptor and/or by preventing receptor activities, such as dimerization.

[0263] For example, a CSR isoform can compete with a CSR for ligand binding. A CSR isoform, when it binds to a receptor, can be a negative effector ligand, which results in inhibition of receptor function. It also is possible that some CSR isoforms bind a cognate receptor, resulting in activation of the receptor. A CSR isoform can act as a competitive inhibitor of a CSR, for example, by complexing with a CSR isoform and altering the ability of the CSR to multimerize (e.g. dimerize or trimerize) with other CSRs. A CSR isoform can compete with a CSR for interactions with other polypeptides and cofactors in a signal transduction pathway. The cell surface isoforms and families of isoforms provided herein include, but are not limited to, isoforms of receptor tyrosine kinases (also referred to herein as RTK isoforms) and isoforms of other families of CSRs, such as TNFs and other G-protein-coupled receptors. In one example, a CSR isoform is a soluble polypeptide. For example, a CSR isoform lacks at least part or all of a transmembrane domain. Soluble isoforms can modulate a biological activity of a wildtype or predominant form of a receptor (see for example, Kendall et al. (1993) PNAS 90: 10705, Werner et al. (1992) Molec. Cell Biol. 12: 82, Heaney et al. (1995) PNAS 92: 2365, Fukunaga et al. (1990) PNAS 87:8702, Wypych et al. (1995) Blood 85: 66-73, Barron et al. (1994) Gene 147:263, Cheng et al. (1994) Science 263: 1759, Dastot et al. (1996) PNAS 93:10723, Abramovich et al. (1994) FEBS Lett 338:295, Diamant et al. (1997) FEBS Lett 412:379, Ku et al. (1996) Blood 88:4124, Heaney ML and Golde DW (1998), J Leukocyte Biol. 64:135-146).

[0264] Exemplary CSR isoforms, including receptor tyrosine kinases (RTKs) or tumor necrosis factor receptors (TNFRs) or RAGE isoforms, include CSR intron fusion proteins provided herein and known to those of skill in the art including any described in copending U.S. application Ser. No. 10/846,113 and corresponding International PCT application No. WO 05/016966, U.S. application Ser. No. 11/129,740, U.S. Provisional application No. 60/678,076, and U.S. application No. (Attorney Docket No. 17118-045P01/P2824).

[0265] Generally, CSR intron fusion proteins are encoded by nucleic acid molecules that are generated by alternative splicing of a gene encoding a cognate cell surface receptor. Typically, a CSR isoform polypeptide contains at least one domain of a cell surface receptor either truncated at the end of an exon or linked to at least one amino acid encoded by an intron of a gene encoding a cognate cell surface receptor. CSRs include all cell surface receptors, such as receptor tyrosine kinases (RTKs), TNFRs, and RAGE receptors.

[0266] Examples of RTKs include, but are not limited to, erythropoietin-producing hepatocellular (EPH) receptors (also referred to as ephrin receptors), epidermal growth factor (EGF) receptors, fibroblast growth factor (FGF) receptors, platelet-derived growth factor (PDGF) receptors, vascular endothelial growth factor (VEGF) receptors, cell adhesion RTKs (CAKs), TIE/Tek receptors, hepatocyte growth factor (HGF) receptors (termed MET), discoidin domain receptors (DDR), insulin growth factor (IGF) receptors, insulin receptor-related (IRR) receptors and others, such as Tyro3/Axl. Examples of TNFRs include, but are not limited to TNFR1, TNFR2, TNFRrp, the low-affinity nerve growth factor receptor, Fas antigen, CD40, CD27, CD30, 4-1BB, OX40, DR3, DR4, DR5, and herpesvirus entry mediator (HVEM). Exemplary genes encoding RTKs or TNFRs include any listed in Table 3 including, but are not limited to, ErbB2, ErbB3, DDR1, DDR2, EGFR, EphA1, EphA2, EphA3, EphA 4, EphA 5, EphA 6, EphA 7, EphA8, EphB1, EphB2, EphB3, EphB4, EphB5, EphB6, FGFR-1, FGFR-2, FGFR-3, FGFR-4, Flt1(also known as VEGFR-1), VEGFR-2, VEGFR-3 (also known as VEGFRC), MET, RON, PDGFR-A, PDGFR-B, CSF1R, Flt3, KIT, TIE-1, TEK (also known as TIE-2), HER-2, RAGE, TNFR2, and genes encoding the RTKs and TNFRs noted above and not set forth. Table 3 provides non-limiting examples of exemplary CSR intron fusion proteins, including SEQ ID NOS for exemplary polypeptide sequences and the encoding nucleic acid sequences. Typically, one of skill in the art can determine the presence or absence of structural motifs of an isoform, including a precursor or signal sequence or other protein domain(s), compared to a cognate full-length receptor of an isoform. For example, alignment of an isoform with a full-length cognate receptor can be made to determine the presence or absence of a signal sequence and/or other domains known to exist for a cognate receptor. Using such alignments, amino acid residues contained in a signal sequence of exemplary CSR isoforms are listed in Table 3. In another example, an isoform can be tested for an activity, such as for example secretion or ligand binding, to determine if an activity of a domain is reduced or eliminated and/or a structure is altered compared to a full-length cognate receptor. CSR isoforms, such as those described below in Table 3, can be used in a fusion protein to improve the production, such as by secretion, of a CSR isoform.

TABLE 3
Exemplary CSR Intron Fusion Proteins

| | | | Signal | SEQ ID NO: | SEQ ID NO: |
|---|---|---|---|---|---|
| Gene | ID # | AA length | Sequence | (nucleic acid) | (amino acid) |
| DDR1 | SR005A11 | 286 | 1-18 | 139 | 140 |
| DDR1 | SR005A10 | 243 | 1-18 | 141 | 142 |
| DDR1.h | | 444 | 1-18 | n/a | 143 |
| EphA1 | SR004G03 | 474 | 1-23 | 144 | 145 |
| EphA1 | SR004G07 | 311 | 1-23 | 146 | 147 |
| EphA1 | SR004H03 | 490 | 1-23 | 148 | 149 |
| EphA1.b | | 166 | | n/a | 150 |
| EphA2 | SR016E12 | 497 | 1-24 | 151 | 152 |
| EphA8.b | | 495 | 1-30 | n/a | 153 |
| EphB1 | SR005D06 | 242 | 1-17 | 154 | 155 |
| EphB4 | SR012C08 | 306 | 1-15 | 156 | 157 |
| EphB4 | SR012D11 | 516 | 1-15 | 158 | 159 |
| EphB4 | SR012E11 | 414 | 1-15 | 160 | 161 |
| EGFR.a | | 405 | 1-24 | n/a | 162 |
| ErbB2 | herstatin | 419 | 1-22 | n/a | 289 |
| ErbB2.1.d | | 680 | 1-24 | n/a | 163 |
| ErbB2.1.e | | 633 | 1-22 | n/a | 164 |
| ErbB2.1.f | | 575 | 1-22 | n/a | 165 |
| ErbB2.a | | 90 | 1-22 | n/a | 166 |
| ErbB2.c 31 | | 419 | 1-22 | n/a | 167 |
| ErbB3.d 31 | | 331 | 1-19 | n/a | 168 |
| FGFR-1 | SR001E12 | 228 | 1-21 | 169 | 170 |
| FGFR-1 | SR022C02 | 320 | 1-21 | 171 | 172 |
| FGFR-2 | SR022C10 | 266 | 1-21 | 173 | 174 |
| FGFR-2 | SR022C11 | 317 | 1-21 | 175 | 176 |
| FGFR-2 | SR022D04 | 281 | 1-21 | 177 | 178 |
| FGFR-2 | SR022D06 | 396 | 1-21 | 179 | 180 |
| FGFR-2.b 31 | | 366 | 1-21 | n/a | 181 |
| FGFR-4 | SR002A11 | 72 | 1-24 | 182 | 183 |
| FGFR-4 | SR002A10 | 446 | 1-24 | 184 | 185 |
| FGFR-4.d 31 | | 209 | | n/a | 186 |
| MET | SR020C10 | 413 | 1-24 | 187 | 188 |
| MET | SR020C12 | 468 | 1-24 | 189 | 190 |
| MET | SR020D04 | 518 | 1-24 | 191 | 192 |
| MET | SR020D07 | 596 | 1-24 | 193 | 194 |
| MET | SR020D11 | 408 | 1-24 | 195 | 196 |
| MET | SR020E11 | 621 | 1-24 | 197 | 198 |
| MET | SR020F08 | 664 | 1-24 | 199 | 200 |
| MET | SR020F11 | 719 | 1-24 | 201 | 202 |
| MET | SR020F12 | 697 | 1-24 | 203 | 204 |
| MET | SR020G03 | 691 | 1-24 | 205 | 206 |
| MET | SR020G07 | 661 | 1-24 | 207 | 208 |
| MET | SR020H03 | 755 | 1-24 | 209 | 210 |
| MET | SR020H06 | 823 | 1-24 | 211 | 212 |
| MET | SR020H07 | 877 | 1-24 | 213 | 214 |
| MET | SR020H08 | 764 | 1-24 | 215 | 216 |
| MET 34 | | 934 | 1-24 | | 217 |
| RON | SR004C11 | 495 | 1-24 | 218 | 219 |
| RON | SR014C01 | 541 | 1-24 | 220 | 221 |
| RON | SR014C09 | 908 | 1-24 | 222 | 223 |
| RON | SR014E12 | 647 | 1-24 | 224 | 225 |
| CSF1R | SR00SA06 | 306 | 1-19 | 226 | 227 |
| KIT | SR002H01 | 413 | 1-22 | 228 | 229 |
| PDGFR-A.b 31 | | 217 | 1-23 | n/a | 230 |
| PDGFR-A.c 34 | | 218 | 1-23 | n/a | 231 |
| PDGFR-B | SR007C09 | 336 | 1-32 | 232 | 233 |
| RAGE | SR021A05 | 146 | 1-22 | 234 | 235 |
| RAGE | SR021C02 | 266 | 1-22 | 236 | 237 |
| RAGE | SR021C06 | 387 | 1-22 | 238 | 239 |
| RAGE | SR021C08 | 173 | 1-22 | 240 | 241 |
| RAGE | SR021F06 | 172 | 1-22 | 242 | 243 |
| TEK | SR007G02 | 367 | 1-18 | 244 | 245 |
| TEK | SR007H03 | 468 | 1-18 | 246 | 247 |
| TEKc | | 864 | 1-18 | n/a | 248 |
| TEKc 31 | | 798 | | n/a | 249 |
| TEKc 34 | | 821 | 1-18 | n/a | 250 |
| Tie-1 | | 786 | 1-21 | n/a | 251 |
| Tie-1 | SR006A04 | 251 | 1-21 | 252 | 253 |
| Tie-1 | SR006B07 | 379 | 1-21 | 254 | 255 |
| Tie-1 | SR006B06 | 161 | 1-21 | 256 | 257 |
| Tie-1 | SR006B12 | 414 | 1-21 | 258 | 259 |
| Tie-1 | SR006B10 | 317 | 1-21 | 260 | 261 |
| Tie-1 | SR016G03 | 751 | 1-21 | 262 | 263 |
| Tie-1 | | 838 | 1-21 | n/a | 264 |
| Tie-1 | | 632 | 1-21 | n/a | 265 |
| Tie-1 | | 533 | 1-21 | n/a | 266 |
| Tie-1 | | 428 | 1-21 | n/a | 267 |
| Tie-1 | | 344 | 1-21 | n/a | 268 |
| Tie-1 | | 255 | 1-21 | n/a | 269 |
| Tie-1 | | 197 | 1-21 | n/a | 270 |
| TNFR2 (TNFR1B) | SR003H02 | 155 | 1-22 | 271 | 272 |
| VEGFR-1 | SR004C05 | 174 | 1-26 | 273 | 274 |
| VEGFR-1 (FLT1.c 31) | | 479 | 1-26 | n/a | 275 |
| VEGFR-1 (FLT1.c 32) | | 523 | 1-26 | n/a | 276 |
| VEGFR-1 (FLT1.c 33) | | 436 | 1-26 | n/a | 277 |
| VEGFR-1 (FLT1.c 34) | | 365 | 1-26 | n/a | 278 |
| VEGFR-1 (FLT1.c) | SR018C02 | 541 | 1-26 | n/a | 279 |
| VEGFR-1 (FLT1.d 31) | | 687 | 1-26 | n/a | 280 |
| VEGFR-2 | SR01SF01 | 712 | 1-19 | 281 | 282 |
| VEGFR-3 | SR01SG09 | 765 | 1-22 | 283 | 284 |
| VEGFR-3 | SR007E10 | 227 | 1-22 | 285 | 286 |
| VEGFR-3 | SR007F05 | 295 | 1-22 | 287 | 288 |

[0267] 2. Ligand Isoforms

[0268] Ligand isoforms are isoforms of ligands that normally interact with a receptor, such as a CSR. Ligand isoforms can contain a new domain and/or a function compared to a wildtype and/or predominant form of the ligand. The deletion, disruption and or insertion in the polypeptide sequence of a ligand isoform is sufficient to alter an activity compared to that of a wildtype or predominant form of a ligand or change the structure compared to a wildtype or predominant form of a ligand, such as by elimination of one or more domains or by addition of a domain or portion thereof, such as one encoded by an intron in the gene. One or more activities can be altered in a ligand isoform compared with a wildtype or predominant form of a ligand. Altered activities include altered interaction with one or more receptors and/or altered signal transduction that results from such interaction. For example, by virtue of such altered activity, a ligand isoform can act as an antagonist of the activity of the wild-type ligand, such as by competitively inhibiting binding to its receptor.

[0269] Generally, an activity of a ligand (i.e., receptor interaction) or a process that occurs by virtue of the activity of a ligand (i.e., signal transduction) is altered in a ligand isoform by at least 0.1, 0.5, 1, 2, 3, 4, 5, or 10 fold compared to a wildtype and/or predominant form of the ligand. Typically, an activity is altered 10, 20, 50, 100 or 1000 fold or more. For example, an isoform can exhibit a reduction in an activity compared to a wildtype and/or predominant form of the ligand. An isoform also can exhibit increased activity compared to a wildtype and/or predominant form of a ligand. Typically, a ligand isoform of a ligand that has several activities or functions will lack one or more of such activities or functions. For example, some ligands bind to receptors resulting in a cascade of events, such as signal transduction. The ligand isoform may bind to the receptor but fail to initiate the cascade of events or initiate it to a lesser extent.

[0270] Exemplary of ligand isoforms are growth factor ligand isoforms. Exemplary thereof are hepatocytes growth factor (HGF) isoforms. In one example, an HGF isoform is altered in cell surface interaction, including receptor interaction. For example, an isoform is reduced in binding affinity for one or more receptors, such as for example a MET receptor. In another example, an isoform exhibits increased affinity for one or more receptors. A ligand isoform, such as an HGF isoform, can exhibit altered binding to other cell surface molecules. In one example, isoforms can be altered in binding to glycosaminoglycans (GAGs), such as heparin or heparin sulfate. In another example, isoforms can be altered in binding to other cell surface proteins involved in angiogenesis, such as for example, endothelial ATP synthase, angiomotin, αvβ3 integrin, annexin II, and/or any one or more growth factor receptors such as MET, FGFR, or VEGFR. HGF isoforms can be altered in one or more facets of signal transduction. An isoform, compared with a wildtype or predominant form of HGF, can be altered in the modulation of one or more biological activities, including inducing, augmenting, suppressing and preventing cellular responses to a receptor. Examples of cellular responses that can be altered by an HGF isoform, include, but are not limited to, induction of mitogenic, motogenic, morphogenic and angiogenic responses, and/or the induction of signaling molecules such as those involved in a signal transductionn pathway.

[0271] Ligand isoforms, such as HGF isoforms, also can modulate an activity of another polypeptide. The modulated polypeptide can be a wildtype or predominant form of the ligand, such as HGF, or can be a wildtype or predominant form of another growth factor, such as FGF-2 or VEGF. For example, an HGF isoform also can modulate another HGF, FGF-2, or VEGF isoform, such as isoforms expressed in a disease or condition. Such HGF isoforms can act as negatively acting ligands by preventing or inhibiting one or more activities of a wildtype or predominant form of a growth factor ligand/receptor pair. A negatively acting ligand need not bind to or affect the ligand binding domain of a receptor, nor affect ligand binding of the receptor.

[0272] In one example, an HGF isoform competes with another growth factor ligand for binding to a cell surface protein necessary for mediating receptor dimerization and/or angiogenic responses of the growth factor. For example, an HGF isoform can compete with another growth factor ligand for binding to heparin or a GAG, thereby preventing the formation of a dimeric ligand required for ligand-mediated signaling of its receptor. In another example, an HGF isoform competes with another HGF form for receptor binding. Such isoforms can thus bind receptors and reduce the amount of receptor available to bind to other HGF polypeptides. HGF isoforms that bind and compete for one or more receptors of HGF can include HGF isoforms that do not participate in signal transduction or are reduced in their ability to participate in signal transduction compared to a cognate HGF.

[0273] Exemplary ligand isoforms, including HGF intron fusion protein isoforms, include ligand isoforms provided herein and known to those of skill in the art including any described in U.S. provisional application Ser. No. 60/735,609 filed Nov. 10, 2005 and corresponding U.S. application No. (attorney docket No. 17118-045001/2824) and International application No. (attorney docket No. 17118-045WO1/2824PC) filed on the same day herewith. Generally, ligand isoforms are encoded by nucleic acid molecules that are generated by alternative splicing of a gene encoding a ligand. Typically, a ligand intron fusion protein isoform polypeptide contains at least one domain of a ligand linked to at least one amino acid encoded by an intron of a gene encoding a ligand or is truncated at the end of an exon by virtue of alternative splicing that introduces a stop codon that occurs, upon splicing, as the first codon in the intron.

[0274] Table 4 provides non-limiting examples of exemplary ligand intron fusion protein isoforms, including SEQ ID NOS for exemplary polypeptide sequences and the encoding nucleic acid sequences. One of skill in the art can determine the presence or absence of structural motifs of an isoform, including a precursor or signal sequence or other protein domain(s), compared to a cognate full-length ligand of an isoform. For example, alignment of an isoform with a full-length cognate ligand can be made to determine the presence or absence of a signal sequence and/or other domains known to exist for a cognate ligand. Using such alignments, amino acid residues contained in a signal sequence of exemplary ligand isoforms are listed in Table 4. In another example, an isoform can be tested for an activity, such as for example secretion or receptor binding, to determine if an activity of a domain is reduced or eliminated and/or a structure is altered compared to a full-length cognate ligand. Ligand isoforms, such as those described below in Table 4, can be used in a fusion protein to improve the production, such as by secretion, of a ligand isoform.

TABLE 4
Exemplary Ligand intron fusion protein isoforms

| | | AA | Signal | SEQ ID NO: | SEQ ID NO: |
|---|---|---|---|---|---|
| Gene | IFP_ID | length | Sequence | (nucleic acid) | amino acid |
| HGF | SR023A02 | 467 | 1-31 | 349 | 350 |
| HGF | SR023A08 | 472 | 1-31 | 351 | 352 |
| HGF | SR023E09 | 514 | 1-31 | 353 | 354 |

[0275] 3. Allelic and Species Variants of Isoforms and Mutations

[0276] Allelic variants of CSR or ligand isoform sequences occur or can be generated or identified that differ in one or more amino acids from a particular CSR or ligand isoform. Such variation includes variations among alleles in a single population or between species.

[0277] Variations include allelic variations that occur among members of a population and species variations that occur between and among species. Variations also include mutations that occur in an animal or that are synthetically produced. For example, isoforms can be derived from different alleles of a gene; each allele can have one or more amino acid differences from the other. Such alleles can have conservative and/or non-conservative amino acid differences. Variants also include isoforms produced or identified from different subjects, such as individual subjects or animal models or other animals. Amino acid changes can result in modulation of an isoform activity. In some cases, an amino acid difference can be “silent,” having no or virtually no detectable effect on an activity. Variants of isoforms also can be generated by mutagenesis. Such mutagenesis can be random or directed. For example, allelic variant isoforms can be generated that alter amino acid sequences or a potential glycosylation site to effect a change in glycosylation of an isoform, including alternate glycosylation, such as increased or inhibited glycosylation at a site in an isoform.

[0278] Allelic and other variant isoforms can be at least 90% identical in sequence to an isoform. Generally, a variant isoform from the same species is at least 95%, 96%, 97%, 98%, 99% identical to an isoform, typically an allelic variant is 98%, 99%, 99.5% identical to an isoform. Variation between and among species for the same protein can be 60%, 70%., 80%, 85%, 90%, 95%, 96%, 97%, 98%, 99% and greater. Exemplary non-limiting polypeptide sequences, including one or more allelic variants of an isoform provided herein, are set forth in SEQ ID NOS: 290-303, 429-459, or 462. Allelic variants of CSR or ligand isoforms can be included in the fusion proteins provided herein and encoded by the nucleic acid constructs provided herein and methods for expression thereof to improve the production, such as by secretion, of a CSR or ligand isoform.

C. Isoform Fusion Protein Production

[0279] Many therapeutic proteins are produced by recombinant gene expression in appropriate prokaryotic or eukaryotic hosts. Some proteins are produced in cells and isolated therefrom. For others, the expressed protein product is isolated after secretion into the culture medium or, in the case of gram-negative bacteria, into the periplasm between the inner and outer cell membranes. For the purification of many proteins, however, the rate of secretion limits the overall yield of protein product. Production of a polypeptide can be influenced by secretion, expression, and purification of a polypeptide.

[0280] The entry of secreted proteins to the secretory pathway, in prokaryotes and eukaryotes, is directed by specific signal peptides at the N-terminus of the polypeptide chain which are cleaved off during secretion. Signal sequences are predominantly hydrophobic, a feature which may be important in directing a nascent peptide to the membrane for transfer of secretory proteins across the inner membrane of prokaryotes or the endoplasmic reticulum (ER) membrane of eukaryotes. Due to the similarity among prokaryotic and eukaryotic signal sequences, signal sequences are generally adaptable to target the secretion of diverse homologous and heterologous proteins. Secretion is, however, a multi-step process involving several elements of the cellular secretory apparatus and specific sequence elements in the signal peptide (see e.g., Miller et al., (1998) J. Biol. Chem. 273:11409). Therefore, different signal peptides vary in their efficiency with which they direct secretion depending on the particular host cell used. Similarly, different signal peptides vary in the efficiency with which they direct secretion of a heterologous protein. Thus, it is necessary to empirically determine the compatibility of a protein, signal sequence, and host cell for efficient secretion of a protein.

[0281] Methods and products for preparation of CSR isoforms and/or ligand isoforms, including intron fusion proteins, are provided. These CSR isoforms and/or ligand isoforms are produced by expression of nucleic acid molecules that encode polypeptides linked to sequences that result in improved production of a polypeptide isoform. Provided herein are isoforms fused directly or indirectly to any one or more of a precursor sequence, tag including an epitope tag, fluorescent moiety, or other tag, for improved secretion and/or purification of a polypeptide.

[0282] 1. Secretion

[0283] Recombinant polypeptides expressed in host cells accumulate in one of three compartments: the cytoplasm, bacterial periplasm, or the extracellular medium. Efficient secretion of a protein into the extracellular medium provides means for the easier purification of the polypeptide for several reasons. First, there are usually fewer contaminating proteins which simplifies purification methodologies. Also, extracellular production does not require membrane disruption to recover target proteins, and therefore avoids proteolysis of the recombinant polypeptide by intracellular proteases. Finally, assuming the nucleic acid is correctly fused to a signal sequence, the N-terminal amino acid residue of the secreted polypeptide can be identical to the natural gene product after cleavage of the precursor sequence by a specific signal peptidase, endoproteinase, or exoproteinase.

[0284] Secretion requires translocation of the protein across the endoplasmic reticulum (ER) in a cotranslational translocation after the polypeptide is synthesized on a ribosome. Many polypeptides are synthesized as a preproprotein or proprotein containing a pre-and/or prosequence. In mammalian cells, a presequence, also called a signal sequence, is recognized by a 54 kDa protein of the signal recognition particle (SRP) which is believed to hold the nascent chain in a translocation-competent conformation until it contacts the ER. The SRP consists of a 7S RNA and six different polypeptides. The 7S RNA and the 54 kDa signal-sequence binding protein (SRP54) of mammalian SRP exhibit strong similarity to the 4.5S RNA and P48 protein (Ffh) of E. coli which forms the signal recognition particle in bacteria. Generally, translocation of a polypeptide across the ER occurs while it is still being translated and synthesized on a ribosome. At the ER membrane, the nascent protein is inserted into a protein channel that passes through the ER membrane. The signal sequence is immediately cleaved from the polypeptide once it has been translocated. Some polypeptides also contain one or more prosequences that can have diverse functions such as, for example, aiding in the folding of an active polypeptide thereby functioning as an intramolecular chaperone, although prosequences can exhibit other regulatory functions. Upon completion of folding, a prosequence is cleaved by endo- or exo- proteases because generally the prosequence is not necessary for the activity or stability of a mature polypeptide. The ER also contains other resident chaperones which also facilitate folding of the polypeptide protein.

[0285] Once folded, the protein is modified, such as by glycosylation, transported to the Golgi apparatus for packaging into vesicles, and secreted from the cell by exocytosis. Secretion of a polypeptide can occur constitutively, which is the default pathway in all cells, whereby transport vesicles destined for the plasma membrane leave the trans-Golgi network in a steady stream for exocytosis of a polypeptide. In some cells, such as neural or endocrine cells, secretion of a polypeptide can be regulated, such as for example by the presence of a sorting or retention signal, which targets a polypeptide to secretory vesicles for later release in response to distinct types of stimulation.

[0286] Prokaryotic cells have no organelles such as the ER, but they do have ribosomes bound to the plasma membrane which synthesize secreted proteins for secretion into the space between the plasma membrane and the cell wall (the periplasmic space) in gram negative bacteria. Such secreted proteins have similar N-terminal peptide sequences to eukaryotic secreted proteins, which are cleaved following secretion. Generally, secreted polypeptides are synthesized in the cytoplasm as premature polypeptides and are converted to a mature polypeptide upon cleavage of the signal peptide during transport out of the cytoplasm into the periplasm. Although some secreted proteins can leak from the periplasmic space into the culture medium, E. coli normally do not secrete proteins extracellularly. Rather, movement of polypeptides from the periplasm to the extracellular medium requires outer-membrane disruption. A number of methods, in addition to the presence of a precursor sequence, have been applied to promote extracellular secretion of polypeptides from E. coli including, but not limited to, hemolysin or OmpF fusion, co-expression of kil or tolA, the use of L-form cells, wall-less or wall-deficient cells, and/or coexpression of the bacteriocin release protein (BRP) (see e.g., Choi et al., (2004) Appl Microbiol Biotechnol, 64:625).

[0287] Typically, a signal sequence of a polypeptide consists of three regions: an amino-terminal region at the N-terminus of the signal peptide (n-region) containing positively charged amino acid residues, a central hydrophobic core (h-region) of more than 7-8 hydrophobic amino acid residues, and a carboxy terminal region (c-region) that includes the signal peptide cleavage site and is usually a more polar region. In eukaryotes, the characteristic charge of the n-region is supplied by a free amino group at the N-terminal amino acid, whereas in prokaryotes the N-terminal amino acid is formylated and an amino acid with a positively charged side chain is required. Further, the eukaryotic h-region is dominated by Leu with some occurrence of Val, Ala, Phe, and Ile, whereas the prokaryotic h-region is dominated by Leu and Ala in approximately equal proportions. The cleavage of the signal peptide from the mature protein occurs at a specific site in the c-region and the cleavage specificity resides in the last residue of the signal sequence. Small and neutral amino acids at position -1 and -3 of the c-region, usually an Ala, confers processing specificity. In addition to slightly different sequence preferences, eukaryotic signal peptides are somewhat shorter than gram-negative signal peptides, and markedly shorter than gram-positive signal peptides.

[0288] Various methods have been used to predict which N-terminal sequences may perform the function of a signal peptide. For example, a widely used algorithm is described in Nielsen et al., (1997) Prot. Eng. 10:1. This algorithm predicts which sequences may serve as a signal peptide with a reasonable degree of accuracy. It does not, however, predict which sequences will function most efficiently. Such methods also are only partially capable of predicting the sites of cleavage at the junction between the signal peptide and the mature protein; for example, the method of Nielsen et al., predicts correctly the site of cleavage of the signal peptide in only 89% of prokaryotic signal sequences. Indeed, some signal peptidases, although biased towards regions containing a consensus sequence following the -3, -1 rule, appear to recognize an unknown three-dimensional motif rather than a specific amino acid sequence around the cleavage site (Dev and Ray (1990) J Bioenerg Biomembr 22:271).

[0289] The efficiency of protein secretion varies depending on the host strain, signal sequence, and the type of protein to be secreted. Therefore, there is no general rule in selecting a proper signal sequence for a given recombinant protein to guarantee its successful secretion. For example, despite the similarities among signal peptides, each has a unique sequence. It is likely, therefore, that the various sequences found in different signal peptides interact in different ways with the host cell secretion apparatus. Further, a sequence encoding a signal peptide also often interacts with downstream sequences within the mature protein. For example, in prokaryotes there is a bias in the first 5 amino acids of a successfully cleaved mature protein for the amino acids Ala, Asp/Glu and Ser/Thr. Charged residues close to the N-terminus of the mature protein can negatively influence secretion (called the “charge block” effect, see e.g., Johansson et al., (1993) Mol Gen Genet. 239:256).

[0290] Consequently, the choice of signal sequence for optimizing the secretion and expression of a polypeptide is largely empirical since signal sequences widely differ in their ability to facilitate protein translocation, and this is often dependent on the polypeptide to be expressed. A fundamental reason for the variation in signal sequence function is related to the differences in efficacy between heterologous and homologous secretion signals. For example, since many proteins are regulated under physiological conditions, the use of natural endogenous regulatory signals, including signal sequences, for secretion and overexpression of a polypeptide in a homologous host system is not desirable. In another example, foreign signal sequences (e.g. mammalian signal sequences) are not always as efficient in heterologous host cells (e.g. such as insect cells). Thus, it is often, but not always, necessary to substitute an endogenous signal sequence of a foreign polypeptide with a signal sequence derived from the species of the host expression cell.

[0291] Use of a host cell for expression of an isoform fusion also can be empirically determined. Generally, a host cell is employed where a signal peptide is compatible with a host cell. A functional signal peptide promotes the extracellular secretion of the polypeptide followed by the cleavage of the signal peptide from the polypeptide. Specific endoproteinases allow the signal peptide to be cut in order to obtain the authentic target sequence. Importantly, the position at which the signal peptide is cleaved can vary according to factors such as the type of host cells employed in expressing a recombinant polypeptide, due in part to the presence of the optimum endoproteinase. Thus, in some instances, the use of a particular signal peptide in a particular host cell can result in the secretion of a polypeptide mixture having different N-terminal amino acids, resulting from cleavage of the signal peptide at more than one site.

[0292] Typically, consideration of a signal sequence to be used is dependent upon the host cell to be employed for expression, although some signal sequences are compatible with heterologous hosts. For example, for prokaryotic host cells that do not recognize and process a native intron fusion protein isoform polypeptide, a prokaryotic signal sequence such as, but not limited to, an alkaline phosphatase, penicillinase, or heat-stable enterotoxin II leaders can substitute an endogenous intron fusion protein signal sequence or can be operatively linked to an intron fusion protein that does not contain a functional signal sequence. In another example, for yeast secretion, a yeast invertase, alpha factor, or acid phosphatase signal sequence can substitute a native intron fusion protein isoform signal sequence or can be fused to an intron fusion protein that does not contain a signal sequence. Secretion and expression of an isoform polypeptide in insect cells can be facilitated by using an insect signal sequence such as, but not limited to gp67 or honeybee mellitin to substitute or provide a signal sequence for an intron fusion protein isoform. Additionally, a plant-derived signal sequence can be used to substitute or provide a signal sequence for secretion of an intron fusion protein isoform in a plant. In mammalian cell expression, although an endogenous signal sequence can be satisfactory if it is functional, other mammalian signal sequences, such as for example a tissue plasminogen activator signal sequence, can be superior particularly if secretion of an isoform is desired.

[0293] In some examples, a heterologous signal sequence is sufficient and often desired for secretion of a intron fusion protein isoform, including CSR or ligand intron fusion proteins, in a host cell. Considerations for using a cross-host secretion signal include 1) that the signal sequence confers secretion of nucleic acids of different origins (i.e. prokaryotic or eukaryotic); 2) that the functionality of the signal sequence extends beyond its original host; and 3) that the expression and secretion of a polypeptide results in a functional product of appreciable quantity. For example, a human growth hormone (hGH) signal sequence can promote the secretion and expression of recombinant proteins, including intron fusion proteins, in bacterial, insect, and mammalian host expression systems. In another example, a human serum albumin (hHSA) signal sequence can substitute for an endogenous signal sequence and/or can provide for a functional signal sequence to an intron fusion protein isoform to facilitate the expression and secretion of an isoform polypeptide in yeast, insects, and mammalian cells. Additionally, a signal sequence from tissue plasminogen activator can be used to mediate the secretion of polypeptides, including CSR and ligand intron fusion protein isoforms, in insect and mammalian cells. Exemplary signal sequences can include prokaryotic and eukaryotic signal sequences including signal sequences selected from among plant, bacterial, yeast, insect, and mammalian signal sequences.

[0294] Exemplary polypeptide precursor sequences can include a signal sequence and optionally also include a prosequence. A leader pro-peptide encoded by a pro-sequence is typically short in composition and contains specific cleavage sites for cleavage by a protease. Generally, cleavage of a pro-peptide sequence occurs within the cell before secretion, such as by an endoprotease, although some polypeptides such as for example apo A1 and prorenin, are secreted intact and cleaved by an extracellular protease or exoprotease. In some examples, a pro-sequence is cleaved both by an endoprotease and an extracellular protease. For example, the pro-sequence of tissue plasminogen activator (tPA) is cleaved by furin in the cell before secretion, and subsequently by a plasmin-like protease following secretion out of the cell. Generally, endoproteases involved in pro-peptide processing such as those with KEX or furin type activities, cleave following dibasic residues through tri and tetrabasic signals. Although many exceptions exist for cleavage requirements, generally pro-peptide cleavage sites are characterized by a basic residue at position-4. Functionally, pro-peptide sequences are diverse and can function to maintain the conformation of a polypeptide, to provide activation of a polypeptide upon the removal of a pro-peptide, and/or to provide recognition sites. Other pro-sequences, for example in tissue plasminogen activator, serve no apparent function and may be retained as an evolutionary remnant (Berg et al., (1991) Biochem Biophys Res Comm, 179: 1289). Exemplary precursor sequences are listed in Table 5.

TABLE 5
Examples of precursor sequences

| | | |
|---|---|---|
| | | SEQ |
| | | ID |
| Precursor Sequence | Amino Acid Sequence NO | |

Bacterial

| | | |
|---|---|---|
| PelB (pectate lyase B) | MKYLLPTAAAGLLLLAAQPAMA | 60 |
| from Erwinia | | |
| carotovora | | |
| OmpA (outer-membrane | MKKTAIAIAVALAGFATVAQA | 61 |
| protein A) | | |
| StII (heat-stable | MKKNIAFLLASMFVFSIATNAYA | 62 |
| enterotoxin II) | | |
| Endoxylanase from | MFKFKKKFLVGLTAAFMSISMFS | 63 |
| Bacillus sp. | ATASA | |
| PhoA (alkaline | MKQSTIALALLPLLFTPVTKA | 64 |
| phosphatase) | | |
| OmpF (outer-membrane | MMKRNILAVIVPALLVAGTANA | 65 |
| protein F) | | |
| PhoE (outer-membrane | MKKSTLALVVMGIVASASVQA | 66 |
| pore protein E) | | |
| MalE (maltose-binding | MKIKTGARILALSALTTMMFSAS | 67 |
| protein) | ALA | |
| OmpC (outer-membrane | MKVKVLSLLVPALLVAGAANA | 68 |
| protein C) | | |
| Lpp (murein lipo- | MKATKLVLGAVILGSTLLAG | 69 |
| protein) | | |
| Lipoprotein (from S. | MNRTKLVLGAVILGSHSAG | 70 |
| marcesens) | | |
| LamB (λ receptor | MMITLRKLPLAVAVAAGVMSAQA | 71 |
| protein) | MA | |
| OmpT (protease VII) | MRAKLLGIVLTTPIAISSFA | 72 |
| LTB (heat-labile | MNKVKCYVLFTALLSSLYAHG | 73 |
| enterotoxin subunit B) | | |
| RbsB (ribosome binding | MNMKKLATLVSAVALSATVSANA | 74 |
| protein) | MA | |
| Heat labile toxin | MKNITFIFFILLASPLYA | 75 |
| subunit A | | |
| β-lactamase (from S. | MKKLIFLIVIALVLSACNSNSSHA | 76 |
| Aureus) | | |
| Staphylococcal protein | MKKKNIYSIRKLGVGIASVTLGTL | 77 |
| A | LISGGVTPAANA | |
| Penicillinase | MSIQHFRVALIPFFAAFCLPVFA | 78 |
| Haemolysin | MMKKTITLLTALLPLASAV | 79 |
| Bacteriophage fd gene | MKKLLFAIPLVVPFYSHS | 80 |
| III | | |
| Yeast | | |
| α-mating factor | MRFPSIFTAVLFAASSALA | 81 |
| PHO1 (acid | MFLQNLFLGFLAVVCANA | 82 |
| phosphatase) | | |
| K. lactis killer toxin | MLVSDSSVDGGERRSS | 83 |
| invertase | MLLQAFLFLLAGFAAKISA | 84 |
| Plant | | |
| PR1b (extracellular | MGFFLFSQMPSFFLVSTLLLFLII | 85 |
| pathogenesis related | SHSSHA | |
| protein, Nichotiana | | |
| tabacum) | | |
| Insect | | |
| gp67 | MLLVNQSHQGFNKEHTSKMVSAIV | 86 |
| | LYVLLAAAAHSAFAAG | |
| Honeybee mellitin | MKFLVNVALVFMVVYISYIYA | 87 |
| EGT (ecdysteroid UDP- | MTILCWLALLSTLTAVNA | 88 |
| glucosyltransferase) | | |
| Mammalian | | |
| tPA (tissue | MDAMKRGLCCVLLLCGAVFVSPS | 89 |
| plasminogen activator) | | |
| presequence | | |
| tPA pre/prosequence | MDAMKRGLCCVLLLCGAVFVSPSQ | 2 |
| | EIHARFRRGAR | |
| pap (human placental | MLLLLLLLGLRLQLSLG | 90 |
| alkaline phosphatase) | | |
| hGH (human growth | MATGSRTSLLLAFGLLCLPWLQEG | 91 |
| hormone) | SA | |
| hHSA (human serum | MKWVTFISLLFLFSSAYS | 92 |
| albumin) | | |
| Human prostatic acid | MRAAPLLLARAASLSLGFLFLLFF | 93 |
| phosphatase | WLDRSVLA | |

[0295] 2. Purification and/or Detection

[0296] Purification of a polypeptide generally is needed to produce a polypeptide in appreciable quantity for study and therapeutic use. Considerations in polypeptide purification include minimizing the existence of contaminating material in a purified preparation. Sources of contaminating material occurring during purification can include other polypeptides, nucleic acids, carbohydrates, lipids, or any other material in a starting sample. Further, a polypeptide optimally retains its biological activity following purification.

[0297] Generally, purification of a polypeptide relies on inherent similarities and differences between other polypeptides or potentially contaminating materials. For example, polypeptide similarity is used to purify a polypeptide away from other non-polypeptide contaminants. In contrast, differences in polypeptides, such as for example, differences in size, shape, charge, hydrophobicity, solubility, or biological activity, are used to purify a polypeptide away from other polypeptides. Examples of purification techniques include, but are not limited to, immuno-affinity chromatography, affinity chromatography, protein precipitation, ionic exchange chromatography, hydrophobic interaction chromatography, and size-exclusion chromatography.

[0298] Attaching a “tag” to a polypeptide can facilitate recombinant polypeptide purification and/or detection. Nucleic acids encoding a polypeptide tag can be directly fused to a nucleic acid at the carboxy or amino terminus-encoding end thereof to generate a tagged polypeptide. Generally, a coding sequence for a specific tag can be spliced in frame with the coding sequence of a nucleic acid molecule, such as one encoding an isoform, such as an intron fusion protein isoform, to produce a chimeric polypeptide in which, upon expression, the tag is fused to the isoform polypeptide. The tag can be used for detection and/or efficient purification of a polypeptide without requiring knowledge of any properties of a polypeptide or antibodies against the polypeptide or other such reagents. Certain tags encode an epitope that can be purified or detected by a specific antibody. By virtue of their properties, the tags can simplify purification of a desired polypeptide. For example, a tag can facilitate affinity purification of a polypeptide by providing a known epitope for binding to a binding matrix, such as for example a column or bead, immobilized with an affinity ligand. A polypeptide containing a tag at either its carboxy or amino terminus, can be purified in a one-step process by passing a solution, such as for example cellular medium, through an affinity column where the column matrix has a high affinity for the tag.

[0299] A tag can include short pieces of well-defined peptides (e.g., Poly-His, Flag-epitope or c-myc epitope or HA-tag) or small proteins (bacterial GST, MBP, Thioredoxin, b-Galactosidase, or VSV-Glycoprotein ). In one example, a tag can include multiple peptides creating an oligo-tag. For example, oligohistidine (Poly-His) tags can be prepared composed of a string of histidine residues, i.e. 1, 2, 3, 4, 5, 6, 7, 8, 9, 10, or more histidine residues. In one embodiment, expression of a fusion polypeptide can be monitored using a tag-specific antibody, allowing a polypeptide to be studied without generating a new, specific antibody to that polypeptide. Epitope tagging can be used to localize gene products in living cells, identify associated proteins or track movement of fusion proteins within the cell. In another embodiment, many tags have their own binding characteristics which can be exploited for purification purposes. For example, poly-His-fusion proteins can bind to Nickel-Sepharose or Nickel-HRP. GST-fusion proteins can bind to glutathione-Sepharose. GST fusion tags are particularly effective in bacterial host cell expression systems since GST isoforms are not normally found in bacteria, and thus there is no competition from endogenous bacterial proteins for binding to a glutathione purification resin. In another example, a ubiquitin tag or a SUMO tag can be employed which, besides facilitating purification, also function as chaperones promoting the correct folding of a polypeptide.

[0300] A tag can also be a label such as a luminescent or fluorescent protein and/or any other protein or enzyme that can be detected for localization and/or purification of a polypeptide. In one aspect, isoform fusions can include nucleic acid sequences encoding a luminescent and/or fluorescent protein that are operatively linked to a nucleic acid isoform, including a CSR or ligand intron fusion protein. A luminescent and/or fluorescent polypeptide facilitates the detection, purification, and/or cell localization of a polypeptide. A variety of molecules, such as proteins that emit a detectable light, including luciferins, green fluorescent protein and red fluorescent protein are contemplated herein. Any of a variety of detectable compounds can be used, and can be imaged for detection or purification of a polypeptide by any of a variety of known imaging methods such as for example by using a fluorometer, fluorescence activated cell sorter (FACS), and/or fluorescence microscopy. Exemplary fusion tags, including epitope tags, fluorescent moieies, or other moieties for the detection and/or purification of a polypeptide are listed in Table 6.

TABLE 6
Examples of Fusion Tags

| | | | |
|---|---|---|---|
| | | | SEQ |
| | | | ID |
| Tag | ACC # | Sequence | NO |

| | | | |
|---|---|---|---|
| AU1 | — | DTYRYI | 94 |
| AU5 | — | TDFYLK | 95 |
| DDDDK | — | DDDDK | 96 |
| c-myc | — | EQKLISEEDL | 97 |
| E-tag | — | GAPVPYPDPLEPR | 98 |
| HA | — | YPYDVPDYA | 99 |
| Poly-His | — | (H)n (ex. 6 X His, HHHHHH) | 100 |
| E2 tag | — | GVSSTSSDFRDR | 101 |
| HSV | — | SQPELAPEDPED | 102 |
| KT3 | — | KPPTPPPEPET | 103 |
| S-tag | — | KETAAAKFERQHMDS | 104 |
| VSV-G | — | YTDIEMNRLGK | 105 |
| T7 | — | MASMTGGQQMG | 106 |
| V5 | — | GKPIPNPLLGLDST | 107 |
| Glu-Glu | — | EYMPME | 108 |
| β-galactosidase | P00722 | — | 109 |
| Gal-4 | P04386 | — | 110 |
| Bacterial | P19908 (β chain) | — | 111 |
| luciferase | P19907 (α chain) | | 112 |
| Firefly luciferase | P08659 | —113 | |
| Maltose binding | AAB59056 | — | 114 |
| protein (MBP) | | | |
| Staphylococcal | P02976 | — | 115 |
| protein A | | | |
| Streptococcal | P06654 | — | 116 |
| protein G | | | |
| GFP | AAA27721 | — | 117 |
| Sumo | AAC50996 | — | 118 |
| Ubiquitin | P62988 | — | 119 |
| NusA | P03003 | — | 120 |
| Streptag | | AWRHPQFGG | 121 |
| thioredoxin | NP_418228 | — | 122 |
| GST | P08515 | — | 123 |
| FLAG | — | DYKDDDDK | 124 |
| Protein C | — | EDQVDPRLIDGK | 125 |
| Tag-100 | — | EETARFQPGYRS | 126 |
| T7 gene 10 | — | DLYDDDDK | 127 |

[0301] Isoform polypeptides containing one or more fusion tags can be used directly for biological studies and/or can be directly injected into animals to generate antibodies or for other in vivo uses. Among these tags is the His-tag which is relatively small (i.e. less than 10 amino acids), and therefore is less immunogenic than other larger tags. Further, because of its small size, a His-tag may not need to be removed for downstream applications of a purified polypeptide. For other purposes, such as for example therapeutic uses, and for use with some larger fusion tags that can interfere with a function of a polypeptide, a fusion tag can be removed following purification of a polypeptide by treatment with enzymes to generate tag-free recombinant polypeptide isoforms. In one example, a ubiquitin (Ub) tag can be fused to an isoform sequence and following expression and purification of an isoform polypeptide, de-ubiquitinating enzymes (DUBs) can remove Ub to produce a native polypeptide. In another example, a SUMO protease can be used to cleave a SUMO tag from an isoform polypeptide fusion. In an additional example, a fusion polypeptide can be engineered to encode a recognition site for a site-specific protease. For example, a human rhinovirus (HRV 3C) protease recognition site, LeuGluValLeuPheGln/GlyPro (SEQ ID NO: 138), can be engineered into a fusion polypeptide between the nucleic acid encoding the tag and the encoding nucleic acid of interest. A fusion polypeptide containing a tag, such as for example but not limited to, a His tag, S-tag, thioredoxin, GST, NusA, or any other fusion tag, and an HRV 3C protease recognition site, can be incubated with an HRV 3C protease once the fusion polypeptide is bound to an affinity matrix for release of the polypeptide. Other protease recognition sites, including but not limited to a thrombin (R/X or K/X; SEQ ID NO: 133), enterokinase (DDDDK/; SEQ ID NO: 134), TEV-protease (ENLYFQ/G; SEQ ID NO: 135), Factor Xa (I(D or E)GR/; SEQ ID NO: 136), Genease I (HYE or HYD; SEQ ID NO: 137) or any other protease recognition site known to one of skill in the art, can be engineered into a fusion polypeptide containing a tag for recognition by a site-specific protease and release of a tag-free polypeptide. In some instances, a protease recognition site can be engineered adjacent to a purification tag, followed by a linker between the fusion tag and a polypeptide of interest.

D. Isoform Fusions

[0302] Provided herein are nucleic acid sequences encoding intron fusion protein fusion polypeptides, including CSR and ligand isoforms, for the production of an intron fusion protein isoform and the encoded proteins. The DNA fusion constructs can include nucleic acid encoding signal and other processing sequences as well as tags and other moieties that facilitate expression and production and/or purification. The fusion constructs encoding isoform fusions can be processed intracellularly and also can be processed extracellularly.

[0303] To produce a construct, a nucleic acid encoding an intron fusion protein, such as a nucleic acid encoding all of a portion of a sequence set forth in any one of SEQ ID NOS: 140, 142, 143, 145, 147,149,150, 152,153,155,157, 159, 161, 162, 163, 164, 165, 166, 167, 168, 170, 172, 174, 176, 178, 180, 181, 183, 185, 186, 188, 190, 192, 194, 196, 198, 200,202,204, 206,208,210, 212,214,216, 217,219,221,223,225, 227,229,230,231, 233, 235, 237, 239, 241, 243, 245, 247, 248, 249, 250, 251, 253, 255, 257, 259, 261, 263, 264, 265, 266, 267, 268, 269, 270, 272, 274-280, 282, 284, 286, 288, 289, 350, 352, 354, or allelic variants thereof, can be fused to a nucleic acid encoding a homologous or heterologous precursor sequence that substitutes for and/or provides a functional secretory, processing and/or trafficking sequence. Exemplary encoded precursor sequences are set forth in any one of SEQ ID NOS:2 or 60-93. In one example, an intron fusion protein isoform containing a native or endogenous precursor sequence, such as a signal sequence, of a cognate receptor or ligand can have its precursor sequence supplemented with or replaced with a heterologous or homologous precursor sequence to direct the secretion and production of an isoform polypeptide. In another example, an intron fusion protein isoform that does not contain a precursor sequence of a cognate receptor or ligand can be provided with a heterologous or homologous precursor sequence, fused with an isoform sequence, to improve the secretion and production of an isoform polypeptide. Typically, an isoform that normally (in its native form) contains a signal sequence, does not have this sequence included in a fusion polypeptide containing a heterologous precursor sequence. The precursor sequence is generally utilized by locating it at the N-terminus of a recombinant protein to be secreted from the host cell. A nucleic acid precursor sequence can be operatively joined or linked to a nucleic acid containing the coding region of a CSR or ligand isoform in such a manner that the precursor sequence coding region is upstream of (that is, 5′ of) and in the same reading frame with the isoform coding region to provide an isoform fusion.

[0304] Nucleic acid sequences encoding polypeptide linkers can be employed in fusion proteins to link the precursor sequence to the ligand or CSR isoform. The linkage can be direct or via a linker. Such polypeptide linkers typically contain from about 2 or 2 to about 60 or 60 amino acid residues, for example from about 5 to 40, or from about I0 to 30, 2 to 6,7 or 8 amino acid residues. The linker can be used, for example, to relieve steric hindrance or to confer properties, such as altered solubility or to direct or participate in trafficking. The linker also can be used to introduce a restriction enzyme sequence that is used to facilitate direct linkage of nucleic acid sequences for the generation of fusion proteins. Such restriction enzyme linkers are described herein and known in the art. The length of linkers selected depends upon factors, such as the use for which the linker is included.

[0305] Such encoded polypeptide linkers can be used to impart advantageous properties. For example, the linker moiety can be a flexible spacer amino acid sequence, such as those used in single-chain antibodies. Examples of known linker moieties include, but are not limited to, peptides, such as (GlymSer)n and (SermGly)n, in which n is 1 to 6, including 1 to 4 and 2 to 4, and m is 1 to 6, including 1 to 4, and 2 to 4, enzyme cleavable linkers, linkers for trafficking and others.

[0306] The isoform fusion can be expressed in a host cell, such as a eukaryotic cell, to provide a fusion polypeptide that contains the precursor sequence joined, at its carboxy terminus, to a ligand or CSR isoform at its amino terminus. The fusion polypeptide can be secreted from a host cell. Typically, a precursor sequence is cleaved from the fusion polypeptide during the secretion process, resulting in the accumulation of a secreted isoform in the external cellular environment or, in some cases, in the periplasmic space.

[0307] Optionally an intron fusion protein that is a fusion nucleic acid also can include operative linkage with another nucleic acid sequence or sequences, such as a sequence that encodes a tag set forth in any one of SEQ ID NOS:94-127, that promotes the purification and/or detection of an isoform polypeptide. In other embodiments, a nucleic acid sequence of a CSR or ligand intron fusion protein can contain an endogenous signal sequence and can include fusion with a nucleic acid sequence encoding a fusion tag or tags. Many precursor sequences, including signal sequences and prosequences, and/or fusion tag sequences have been identified and are known in the art, such as, but not limited to, those provided and described herein, and are contemplated to be used in conjunction with an isoform nucleic acid molecule. A precursor sequence may be homologous or heterologous to an isoform gene or cDNA, or a precursor sequence can be chemically synthesized. In most cases, the secretion of an isoform polypeptide from a host cell via the presence of a signal peptide and/or propeptide will result in the removal of the signal peptide or propeptide from the secreted intron fusion protein polypeptide. The precursor sequence can be a component of an expression vector, or it can be part of an isoform nucleic acid sequence that is inserted into an expression vector.

[0308] Hence, expression of a fusion nucleic acid by a host cell can provide an isoform fusion protein that contains additional amino acids which do not adversely affect the secretory function of the signal peptide and/or the activity of a purified isoform protein. For example, additional amino acids can be included in the fusion protein which separate the signal peptide from the isoform protein in order to provide a favored steric configuration in the fusion protein which promotes the secretion process. The number of such additional amino acids which may serve as separators may vary, and generally do not exceed 60 amino acids. In another example, a fusion protein can contain amino acid residues encoded by a restriction enzyme linker sequence. In an additional example, an isoform fusion protein can contain selective cleavage sites at the junction or junctions between the amino acid of the signal peptide and/or epitope tag and the amino acid sequence of the isoform protein. Such selective cleavage sites may comprise one or more amino acid residues which provide a site susceptible to selective enzymatic, proteolytic, chemical, or other cleavage. For example, the additional amino acids can be a recognition site for cleavage by a site-specific protease. The fusion protein can be further processed to cleave the isoform protein therefrom; for example, if the isoform protein is required without additional amino acids.

[0309] 1. Exemplary tPA Secretory Sequence

[0310] Exemplary of a signal polypeptide for linkage to an isoform is a tPA precursor sequence which, in eukaryotic cells, can direct secretion and other trafficking of linked polypeptides.

[0311] Tissue Plasminogen Activator

[0312] Tissue plasminogen activator (tPA) is a serine protease that regulates hemostasis by converting the zymogen plasminogen to its active form, plasmin. Like other serine proteases, tPA is synthesized and secreted as an inactive zymogen that is activated by proteolytic processing. Specifically, the mature partially active single chain zymogen form of tPA can be further processed into a two-chain fully active form by cleavage after Arg-310 of SEQ ID NO:4 catalyzed by plasmin, tissue kallikrein or factor Xa. tPA is secreted into the blood by endothelial cells in areas immediately surrounding blood clots, which are areas rich in fibrin. tPA regulates fibrinolysis due to its high catalytic activity for the conversion of plasminogen to plasmin, a regulator of fibrin clots. Plasmin also is a serine protease that becomes converted into a catalytically active, two-chain form upon cleavage of its zymogen form by tPA. Plasmin functions to degrade the fibrin network of blood clots by cutting the fibrin mesh at various places, leading to the production of circulating fragments that are cleared by other proteinases or by the kidney and liver.

[0313] The precursor sequence of t-PA encodes a polypeptide that includes a presequence and prosequence corresponding to amino acid residues 1-35 of a full-length tPA sequence set forth in SEQ ID NO:4 and exemplified in SEQ ID NO:2. The precursor sequence of tPA contains a signal sequence including amino acids 1-23 and also contains a prosequence including amino acids 1-35 which contains two cleavage sequences resulting in a prosequence that can include amino acids 24-35, 24-32 and 33-35 of an exemplary tPA pre/prosequences set forth in SEQ ID NO: 2 or 4. The signal sequence of tPA is cleaved co-translationally in the ER and a pro-sequence is removed in the Golgi apparatus by cleavage at a furin processing site following the sequence RFRR occurring at amino acids 29-32 of the exemplary sequences set forth in SEQ ID NO: 2 or 4. Furin cleavage of a tPA pro-sequence retains a three amino acid prosequence GAR, set forth as amino acids 33-35 of an exemplary tPA sequence set forth in SEQ ID NO: 2 or 4. The cleavage of the retained prosequence site is mediated by a plasmin-like extracellular protease to obtain a mature tPA polypeptide beginning at Ser36 set forth in SEQ ID NO:4. Inclusion of a protease inhibitor, such as for example aprotinin, in the culture medium can prevent exopeptidases cleavage and thereby retain a GAR pro-sequence in the mature polypeptide of tPA (Berg et al., (1991) Biochem Biophys Res Comm, 179:1289).

[0314] Typically, tPA is secreted by the constitutive secretory pathway, although in some cells tPA is secreted in a regulated manner. For example, in endothelial cells regulated secretion of tPA is induced following endothelial cell activation, for example, by histamine, platelet-activating factor or purine nucleotides, and requires intraendothelial Ca2+ and cAMP signaling (Knop et al., (2002) Biochem Biophys Acta 1600:162). In other cells, such as for example neural cells, specific stimuli that can induce secretion of tPA include exercise, mental stress, electroconvulsive therapy, and surgery (Parmer et al., (1997) J Biol Chem 272:1976). The mechanism mediating the regulated secretion of tPA requires signals on the tPA polypeptide itself, whereas the signal sequence of tPA efficiently mediates constitutive secretion of tPA since a GFP molecule operatively linked only to the signal sequence of tPA is constitutively secreted in the absence of carbachol stimulation (Lochner et al., (1998) Mol Biol Cell, 9:2463). In the absence of a tPA signal sequence, a tPA/GFP hybrid protein is not secreted from cells.

[0315] An exemplary tPA precursor sequence including a pre/propeptide sequence of tPA is set forth in SEQ ID NO: 2, and is encoded by a nucleic acid sequence set forth in SEQ ID NO: 1. The signal sequence of tPA includes amino acids 1-23 of SEQ ID NO:2 and the prosequence includes amino acids 24-35 of SEQ ID NO:2 whereby a furin-cleaved prosequence includes amino acids 24-32 and a plasmin-like exoprotease-cleaved prosequence includes amino acids 33-35. Allelic variants of a tPA pre/prosequence are also provided herein, such as those set forth in SEQ ID NO:6 and encoded by a nucleic acid sequence set forth in SEQ ID NO:5. Further, intron fusion protein fusion of a pre/prosequence of mammalian and non-mammalian origin of tPA are contemplated and exemplary sequences are set forth in SEQ ID NOS: 52-59.

[0316] Provided herein are nucleic acid molecules and constructs encoding tPA-intron fusion protein fusion polypeptides that contain a CSR or ligand isoform, such as an intron fusion protein, fused to a nucleic acid encoding a precursor sequence. Such intron fusion protein sequences provided herein can exhibit enhanced cellular expression and secretion of an intron fusion protein polypeptide for improved production.

[0317] 2. tPA-Intron Fusion Protein and other CSR Fusions

[0318] Provided herein are nucleic acid molecules and constructs encoding tPA-intron fusion protein fusion polypeptides that contain a CSR or ligand isoform, such as an intron fusion protein. Nucleic acid sequences encoding all or a portion of an intron fusion protein or allelic variants thereof, such as encoding an isoform set forth in any one of SEQ ID NOS: 140, 142, 143, 145, 147, 149, 150, 152, 153, 155, 157, 159, 161, 162, 163, 164, 165, 166, 167, 168, 170, 172, 174, 176, 178, 180, 181, 183, 185, 186,188,190, 192, 194, 196, 198,200,202,204, 206, 208,210,212,214,216, 217, 219,221,223,225,227, 229, 230, 231, 233, 235, 237, 239, 241, 243, 245, 247, 248, 249, 250, 251, 253, 255, 257, 259, 261, 263, 264, 265, 266, 267, 268, 269, 270, 272, 274-280, 282, 284, 286, 288, 289, 350, 352, 354 or allelic variants thereof operatively linked to a tPA pre/prosequence are provided. A tPA pre/prosequence can include a tPA pre/prosequence set forth as SEQ ID NO:1 and encoding a polypeptide set forth in SEQ ID NO:2. In some examples, a tPA pre/prosequence can replace an endogenous precursor sequence of an intron fusion protein and/or provide for an optimal precursor sequence for the secretion of an intron fusion protein polypeptide.

[0319] In other embodiments, a nucleic acid encoding all or a portion of an intron fusion protein or allelic variants thereof, such as encoding an isoform set forth in any one of SEQ ID NOS: 140, 142, 143, 145, 147, 149, 150, 152, 153, 155, 157, 159, 161, 162, 163, 164, 165, 166, 167, 168, 170, 172, 174, 176, 178, 180, 181, 183, 185, 186, 188, 190, 192, 194,196, 198, 200, 202, 204, 206, 208, 210, 212, 214, 216, 217, 219, 221, 223, 225, 227, 229, 230, 231, 233, 235, 237, 239, 241, 243, 245, 247, 248, 249, 250, 251, 253, 255, 257, 259, 261, 263, 264, 265, 266, 267, 268, 269, 270, 272, 274-280, 282, 284, 286, 288, 289, 350, 352, 354, or allelic variants thereof can be operatively linked to part of a tPA pre/prosequence including the nucleic acid sequence up to the furin cleavage site of a pre/prosequence of tPA (encoded amino acids 1-32 of an exemplary tPA pre-prosequence set forth in SEQ ID NO:2), thereby excluding nucleic acids encoding amino acids GAR (encoded amino acids 33-35 of an exemplary tPA pre-prosequence set forth in SEQ ID NO:2).

[0320] Additionally, a nucleic acid sequence encoding all or a portion of an intron fusion protein or allelic variant thereof, such as encoding an isoform set forth in any one of SEQ ID NOS: 140, 142, 143, 145, 147, 149, 150, 152, 153, 155, 157, 159, 161, 162, 163, 164, 165, 166, 167, 168, 170,172, 174, 176, 178, 180, 181, 183, 185, 186,188, 190, 192,194, 196, 198, 200, 202, 204, 206, 208, 210, 212, 214, 216, 217, 219, 221, 223, 225, 227, 229, 230, 231, 233, 235, 237, 239, 241, 243, 245, 247, 248, 249, 250, 251, 253, 255, 257, 259, 261, 263, 264, 265, 266, 267, 268, 269, 270, 272, 274-280, 282, 284, 286, 288, 289, 350, 352, 354, or allelic variants thereof, can include operative linkage with allelic variants of all or part of a tPA pre/prosequence, such as encoding any allelic variant set forth in SEQ ID NOS: 5 or can include operative linkage with all or part of other tPA pre/prosequences of mammalian and non-mammalian origin, such as encoding a tPA pre/prosequence set forth in any one of SEQ ID NO:52-59. Intron fusion protein-tPA pre/pro fusion sequences provided herein can exhibit enhanced cellular expression and secretion of an intron fusion protein polypeptide for improved production.

[0321] In another embodiment, a nucleic acid sequence encoding all or a portion of an intron fusion protein or allelic variant thereof, such as encoding an isoform set forth in any one of SEQ ID NOS: 140, 142, 143, 145, 147, 149, 150, 152, 153, 155, 157, 159, 161, 162, 163, 164, 165, 166, 167, 168, 170, 172, 174, 176, 178, 180, 181, 183, 185, 186, 188, 190, 192, 194, 196, 198, 200, 202, 204, 206, 208, 210, 212, 214, 216, 217, 219, 221, 223, 225, 227, 229, 230, 231, 233, 235, 237, 239, 241, 243, 245, 247, 248, 249, 250, 251, 253, 255, 257, 259, 261, 263, 264, 265, 266, 267, 268, 269, 270, 272, 274-280, 282, 284, 286, 288, 289, 350, 352, 354, or allelic variants thereof can include operative linkage with a presequence (signal sequence) only of a tPA pre/prosequence such as an exemplary signal sequence encoding amino acids 1-23 of an exemplary tPA pre/prosequence set forth as SEQ ID NO:2. Intron fusion protein-tPA presequence fusions provided herein can exhibit enhanced cellular expression and secretion of an intron fusion protein polypeptide for improved production.

[0322] In an additional embodiment, a nucleic acid sequence encoding all or a portion of an intron fusion protein or allelic variant thereof, such as encoding any isoform set forth in any one of SEQ ID NOS: 140,142, 143, 145, 147, 149, 150, 152, 153, 155, 157, 159, 161, 162,163, 164, 165,166, 167, 168, 170, 172,174, 176, 178, 180, 181, 183, 185, 186, 188, 190, 192, 194, 196, 198, 200, 202, 204, 206, 208, 210, 212, 214, 216, 217, 219, 221, 223, 225, 227, 229, 230, 231, 233, 235, 237, 239, 241, 243, 245, 247, 248, 249, 250, 251, 253, 255, 257, 259, 261, 263, 264, 265, 266, 267, 268, 269, 270, 272, 274-280, 282, 284, 286, 288, 289, 350, 352, 354, or an allelic variant thereof that contains an endogenous signal sequence of a cognate receptor or ligand can include a fusion with a tPA prosequence where insertion of a tPA prosequence is between an intron fusion protein endogenous signal sequence and an intron fusion protein coding sequence. In one example, a tPA prosequence includes a nucleic acid sequence encoding amino acids 24-32 of an exemplary tPA pre/prosequence set forth as SEQ ID NO:2. In another example, a tPA pro-sequence includes a nucleic acid sequence encoding amino acids 33-35 of an exemplary tPA pre/prosequence set forth as SEQ ID NO:2. In an additional example, a tPA prosequence includes a nucleic acid sequence encoding amino acids 24-35 of an exemplary tPA pre/prosequence set forth as SEQ ID NO:2. Other tPA prosequences can include a nucleic acid sequence encoding amino acids 24-32, 33-35, or 24-35 of allelic variants of tPA pre/prosequences such as set forth in SEQ ID NOS:5 or species variants set forth in any one of SEQ ID NOS: 52-59. Intron fusion protein-tPA prosequence fusions provided herein can exhibit enhanced cellular expression and secretion of an intron fusion protein polypeptide for improved production.

[0323] Additionally, a nucleic acid encoding an intron fusion protein or a t-PA-intron fusion protein, such as for example, an intron fusion protein-tPA pre/prosequence fusion, intron fusion protein-tPA presequence fusion, and/or intron fusion protein-tPA prosequence fusion can optionally also include one, two, three, or more tags that facilitate the purification and/or detection of an intron fusion protein polypeptide. Generally, a coding sequence for a specific tag can be spliced in frame on the amino or carboxy ends, with or without a linker region, with a coding sequence of a nucleic acid molecule encoding an intron fusion protein polypeptide. When fusion is on an amino terminus of a sequence, a fusion tag can be placed between an endogenous or heterologous precursor sequence. In one embodiment a nucleic acid encoding a tag, such as a c-myc tag, 8× His tag, or any other fusion tag known to one of skill in the art or set forth in any one of SEQ ID NOS: 94-127, can be placed between an intron fusion protein endogenous signal sequence and an intron fusion protein coding sequence. In another embodiment, a fusion tag can be placed between a nucleic acid sequence encoding a heterologous precursor sequence, such as a tPA pre/prosequence, presequence, or prosequence set forth in SEQ ID NO:2, and an intron fusion protein coding sequence. In other embodiments, a fusion tag can be placed directly on the carboxy terminus of a nucleic acid encoding an intron fusion protein fusion polypeptide sequence. In some instances, an intron fusion protein fusion can contain a linker between an endogenous or heterologous precursor sequence and a fusion tag. Intron fusion protein fusions containing one or more fusion tag(s) provided herein, including intron fusion protein-tPA fusions, can facilitate easier detection and/or purification of an intron fusion protein polypeptide for improved production.

[0324] a. FGFR-2 tPA-Intron Fusion Protein Fusion

[0325] Provided herein are isoforms of FGFR-2 containing all or part of a pre/prosequence of tPA and optionally a c-myc fusion tag for the improved production of an FGFR-2 intron fusion protein polypeptide. FGFR-2 is a member of the fibroblast growth factor receptor family. Ligands to FGFR-2 include a number of FGF proteins, such as, but not limited to, FGF-1 (basic FGF), FGF-2 (acidic FGF), FGF-4 and FGF-7. FGF receptors are involved in cell-cell communication in tissue remodeling during development as well as cellular homeostasis in adult tissues. Overexpression of, or mutations in, FGFR-2 have been associated with hyperproliferative diseases, including a variety of human cancers, including breast, pancreatic, colorectal, bladder and cervical malignancies. FGFR-2 isoforms such as FGFR-2 intron fusion proteins can be used to treat conditions in which FGF is upregulated, including cancers.

[0326] The FGFR-2 protein (GenBank No. NP_{—}000132 set forth as SEQ ID NO:411) is characterized by a signal sequence between amino acids 1-21. FGFR-2 also contains three immunoglobulin-like domains; domain 1 between amino acids 41-125, domain 2 between amino acids 159-249, and domain 3 between amino acids 256-360. FGFR-2 also contains a transmembrane domain between amino acids 378-400 and protein kinase domain between amino acids 481-757.

[0327] Exemplary FGFR-2 isoforms include FGFR-2 isoforms set forth in SEQ ID NOS: 178 and 180. These exemplary FGFR-2 isoforms lack one or more domains or a part thereof compared to a cognate FGFR-2 such as set forth in SEQ ID NO:411. The exemplary FGFR-2 isoform set forth as SEQ ID NO: 180 contains a signal peptide at amino acids 1-21, and three immunoglobulin-like domains; domain 1 between amino acids 41-125, domain 2 between amino acids 159-249 and domain 3 between amino acids 256-360, but lacks a transmembrane and protein kinase domain. The exemplary FGFR-2 isoform set forth as SEQ ID NO: 178 contains a signal peptide at amino acids 1-21, immunoglobulin-like domain 2 between amino acids 44-134 and domain 3 between amino acids 141-245, but does not contain an immunoglobulin-like domain 1, a transmembrane domain, or a protein kinase domain.

[0328] FGFR-2 isoforms, including FGFR-2 isoforms herein, can include allelic variation in the FGFR-2 isoform polypeptide. For example, a FGFR-2 isoform can include one or more amino acid differences present in an allelic variant of the cognate FGFR-2. In one example, an allelic variant of FGFR-2 contains one or more amino acid changes compared to SEQ ID NO:41 1. For example, one or more amino acid variations can occur in the immunoglobulin domain of FGFR-2. An allelic variant can include amino acid changes at position 105 where, for example Y can be replaced by C, or at position 162 where, for example, M can be replaced by T, or at position 172 where, for example, A can be replaced by F, or at position 186 (SNP NO: 755793) where, for example, M can be replaced by T, or at position 267 where, for example, S can be replaced by P, or at position 276 where, for example, F can be replaced by V, or at position 278 where, for example, C can be replaced by F, or at position 281 where, for example, Y can be replaced by C, or at position 289 where, for example, Q can be replaced by P, or at position 290 where, for example, W can be replaced by C, or at position 315 where, for example, A can be replaced by S, or at position 338 where, for example, G can be replaced by R, or at position 340 where, for example, Y can be replaced by H, or at position 341 where, for example, T can be replaced by P, or at position 342 where, for example, C can be replaced by R, Y, S, F, or W, or at position 344 where, for example, A can be replaced by P or G, or at position 347 where, for example, S can be replaced by C, or at position 351 where, for example, S can be replaced by C, or at position 354 where, for example, S can be replaced by C. Further examples of amino acid changes can occur in the transmembrane domain. An allelic variant can include amino acid changes at position 384 where, for example, G can be replaced by R. Additional amino acid changes also can occur in the protein kinase domain. An allelic variant can include amino acid changes at position 549 where, for example, N can be replaced by H, or at position 565 where, for example, E can be replaced by G, or at position 641 where, for example, K can be replaced by R, or at position 659 where, for example, K can be replaced by N, or at position 663 where, for example, G can be replaced by E, or at position 678 where, for example, R can be replaced by G. Allelic variations also can occur at position 6 where, for example, R can be replaced by P, or at position 31 where, for example, T can be replaced by I, or at position 152 where, for example, R can be replaced by G, or at position 252 where, for example, S can be replaced by W or L, or at position 253 where, for example, P can be replaced by S or R, or at position 372 where, for example, S can be replaced by C, or at position 375 where, for example, Y can be replaced by C. An exemplary FGFR-2 allelic variant containing one or more amino acid changes described above is set forth as SEQ ID NO: 444 and an FGFR-2 isoform can include any one or more allelic variations as set forth in SEQ ID NO:444. An allelic variation in an FGFR-2 isoform can include one or more amino acid changes in the immunoglobulin domain, such as at positions 105, 162, 172, 186, 267, 276, 278, 281, 289, 290, 315, 338, 340, 341, 342, 344, 347, 351, or 354. Additional allelic variations can include one or more amino acid changes, such as at positions 6, 31, 152, 252, or 253.

[0329] FGFR-2 isoforms provided herein, or allelic variations thereof, can include a fusion with tPA, such as substitution of an endogenous signal sequence with all or part of a tPA pre/prosequence. For the exemplary FGFR-2 isoforms provided herein as SEQ ID NO: 178 or 180, amino acids 1-22 of an FGFR-2 isoform, including the endogenous signal sequence containing amino acids 1-21, can be replaced by a tPA pre/prosequence, such as for example, the exemplary tPA pre/prosequence set forth as SEQ ID NO: 2 and encoded by a tPA pre/prosequence set forth as SEQ ID NO: 1. For example, the nucleic acid sequence of an exemplary tPA-FGFR-2 intron fusion protein fusion set forth in SEQ ID NO: 39, encoding a polypeptide set forth in SEQ ID NO:40, can include the nucleic acid sequence encoding amino acids 23-281 of the FGFR-2 isoform set forth in SEQ ID NO: 178 operatively linked at the 5′ end to a sequence containing a tPA pre/prosequence (nucleotides 1-105 of SEQ ID NO:39) and a sequence containing an Xho I restriction enzyme linker site (nucleotides 136-141 of SEQ ID NO:39). Optionally, a sequence of an exemplary tPA-FGFR-2 intron fusion protein fusion set forth in SEQ ID NO:39, and encoding a polypeptide set forth in SEQ ID NO:40, also can include a myc epitope tag set forth as nucleotides 106-135 operatively fused between the tPA pre/prosequence and the Xho I linker site. In another example, the nucleic acid sequence of an exemplary tPA-FGFR-2 intron fusion protein fusion set forth in SEQ ID NO:35, encoding a polypeptide set forth in SEQ ID NO:36, can include the nucleic acid sequence encoding amino acids 23-396 of the FGFR-2 isoform set forth in SEQ ID NO: 180 operatively linked at the 5′ end to a sequence containing a tPA pre/pro sequence (nucleotides 1-1 05 of SEQ ID NO:35) and a sequence containing an Xho I restriction enzyme linker site (nucleotides 136-141 of SEQ ID NO:35). Optionally, a sequence of an exemplary tPA-FGFR-2 intron fusion protein fusion set forth in SEQ ID NO:35, and encoding a polypeptide set forth in SEQ ID NO:36, also can include a myc epitope tag set forth as nucleotides 106-135 operatively fused between the tPA pre/pro sequence and the Xho I linker site.

[0330] b. FGFR4-tPA Intron Fusion Protein Fusion

[0331] Provided herein are isoforms of FGFR-4 containing all or part of a pre/prosequence of tPA and optionally a c-myc fusion tag for the improved production of an FGFR-4 intron fusion protein polypeptide. FGFR-4 is a member of the FGF receptor tyrosine kinase family. FGFR-4 regulation is modified in some cancer cells. For example, in some adenocarcinomas FGFR-4 is down-regulated compared with expression in normal fibroblast cells. Alternate forms of FGFR-4 are expressed in some tumor cells. For example, ptd-FGFR-4 lacks a portion of the FGFR-4 extracellular domain but contains the third Ig-like domain, a transmembrane domain and a kinase domain. This isoform is found in pituitary gland tumors and is tumorigenic. FGFR-4 isoforms can be used to treat diseases and conditions in which FGFR-4 is misregulated. For example, an FGFR-4 isoform can be used to down-regulate tumorigenic FGFR-4 isoforms such as ptd-FGFR-4.

[0332] The FGFR-4 protein (GenBank No. NP_{—}002002 set forth as SEQ ID NO: 413) is characterized by a signal sequence between amino acids 1-24. FGFR-4 also contains three immunoglobulin-like domains; domain 1 between amino acids 35-113, domain 2 between amino acids 152-242, and domain 3 between amino acids 249-351. FGFR-4 also contains a transmembrane domain between amino acids 370-386 and protein kinase domain between amino acids 467-743.

[0333] Exemplary FGFR-4 isoforms lack one or more domains or a part thereof compared to a cognate FGFR-4 such as set forth in SEQ ID NO:413. The exemplary FGFR-4 isoform set forth as SEQ ID NO: 185 contains a signal peptide between amino acids 1-24, an immunoglobulin-like domain 1 between amino acids 35-113, an immunoglobulin-like domain 2 between amino acids 152-242, and an immunoglobulin-like domain 3 between amino acids 249-351, but lacks a transmembrane and protein kinase domain present in the cognate receptor (e.g., SEQ ID NO: 413).

[0334] FGFR-4 isoforms, including FGFR-4 isoforms provided herein, can include allelic variation in the FGFR-4 isoform polypeptide. For example, a FGFR-4 isoform can include one or more amino acid differences present in an allelic variant of the cognate FGFR-4. In one example, an allelic variant of FGFR-4 contains one or more amino acid changes compared to SEQ ID NO:413. For example, one or more amino acid variations can occur in the immunoglobulin domain of FGFR-4. An allelic variant can include amino acid changes at position 275 (SNP NO: 11954456) where, for example, S can be replaced by R, or at position 297 (SNP NO:1057633) where, for example, D can be replaced by V. Additional amino acid changes can occur in the protein kinase domain. An allelic variant can include an amino acid change at position 616 (SNP NO:2301344) where, for example, R can be replaced by L. Allelic variations also can occur at position 10 (SNP NO: 1966265) where, for example, V can be replaced by I, or at position 136 (SNP NO: 376618) where, for example, P can be replaced by L, or at position 388 (SNP NO: 351855) where, for example, G can be replaced by R. An exemplary FGFR-4 allelic variant containing one or more amino acid changes described above is set forth as SEQ ID NO: 446 and an FGFR-4 isoform can include any one or more allelic variations such as set forth in SEQ ID NO:446. An allelic variation in an FGFR-4 isoform can include one or more amino acid changes in an immunoglobulin domain, such as at amino acids corresponding to positions 275 or 297 of SEQ ID NO:413. Additional allelic variants of an FGFR-4 isoform can include any one or more amino acid changes, such as at amino acids corresponding to amino acid positions 10 or 136 of SEQ ID NO:413.

[0335] FGFR-4 isoforms provided herein, or allelic variations thereof, can include a fusion with tPA, such as substitution of an endogenous signal sequence with all or part of a tPA pre/prosequence. For the exemplary FGFR-4 isoform provided herein as SEQ ID NO: 185 amino acids 1-25 of the FGFR-4 isoform, including the endogenous signal sequence containing amino acids 1-24, can be replaced by a tPA pre/prosequence, such as for example, the exemplary tPA pre/prosequence set forth as SEQ ID NO: 2 and encoded by a tPA pre/prosequence set forth as SEQ ID NO: 1. For example, the nucleic acid sequence of an exemplary tPA-FGFR-4 intron fusion protein fusion set forth in SEQ ID NO:41, encoding a polypeptide set forth in SEQ ID NO:42, can include the nucleic acid sequence encoding amino acids 26-446 of the FGFR-4 isoform set forth in SEQ ID NO: 185 operatively linked at the 5′ end to a sequence containing a tPA pre/prosequence (nucleotides 1-105 of SEQ ID NO:41) and a sequence containing an Xho I restriction enzyme linker site (nucleotides 136-141 of SEQ ID NO:41). Optionally, a sequence of an exemplary tPA-FGFR-4 intron fusion protein fusion set forth in SEQ ID NO:41 also can include a myc epitope tag set forth as nucleotides 106-135 operatively fused between the tPA pre/prosequence and the Xho I linker site.

[0336] C. VEGFR-1-tPA Intron Fusion Protein Fusion

[0337] Provided herein are isoforms of VEGFR-1 containing all or part of a pre/prosequence of tPA and optionally a c-myc fusion tag for the improved production of a VEGFR-1 intron fusion protein polypeptide. VEGFR-1 (Flt-1,fms-like tyrosine kinase-1) is a member of the VEGF receptor family of tyrosine kinases. Ligands for VEGFR-1 include VEGF-A and PlGF (placental growth factor). Since VEGFR-1 and its ligands are important for angiogenesis, disregulation of these proteins have a significant impact on a variety of diseases stemming from abnormal angiogenesis, such as proliferation or metastasis of solid tumors, rheumatoid arthritis, diabetic retinopathy, retinopathy and psoriasis. VEGFR-1 also has been implicated in Kawasaki disease, a systemic vasculitis with microvascular hyperpermeability.

[0338] The VEGFR-1 polypeptide set forth as SEQ ID NO:426 (GenBank No. NP_{—}002010, SEQ ID NO:426) is characterized by a signal sequence between amino acids 1-26. The VEGFR-1 polypeptide also contains four immunoglobulin-like domains; domain 1 between amino acids 231-337, domain 2 between 332-427, domain 3 between amino acids 558-656, and domain 4 between amino acids 661-749. VEGFR-1 also contains a transmembrane domain between amino acids 764-780 and protein kinase domain between amino acids 827-1154.

[0339] The exemplary VEGFR-1 isoform set forth as SEQ ID NO: 279 contains a signal peptide between amino acids 1-26, two immunoglobulin-like domains between amino acids 231-337 and between amino acids 332-427, but does not contain immunoglobulin-like domains 2 and 3. Exemplary VEGFR-1 isoforms also can lack one or more other domains or a part thereof compared to a cognate VEGFR-1 such as set forth in SEQ ID NO:426. For example, the exemplary VEGFR-1 isoform (e.g. SEQ ID NO:279) lacks a transmembrane domain and protein kinase domain compared to a cognate VEGFR-1 (e.g. SEQ ID NO:426). VEGFR-1 isoforms, including VEGFR-1 isoforms herein, can include allelic variation in the VEGFR-l polypeptide, such as one or more amino acid changes compared to a cognate VEGFR-1 polypeptide (e.g., SEQ ID NO: 426).

[0340] In some embodiments, a VEGFR-1 polypeptide, such as set forth as SEQ ID NO:426, is described as containing seven Ig-like domains (see e.g., Wiesmann et al. (2000) J Mol Med. 78: 247-260). Such a description includes Ig-like domains that are not classified into the typical domain classifications of Ig V-type or Ig C-type. For example, the VEGFR-1 polypeptide set forth in SEQ ID NO:426 contains a signal sequence between amino acids 1-26. It also contains seven immunoglobulin-like domain including domain 1 between amino acids 38-129, domain 2 between 149-224, domain 3 between amino acids 243-329, domain 4 between amino acids 348-425, domain 5 between amino acids 439-553, domain 6 between amino acids 568-643, and domain 7 between amino acids 673-738. VEGFR-1 also contains a transmembrane domain between amino acids 770-779 and a protein kinase domain between amino acids 827-1154. Hence, based on the above description, the exemplary VEGFR-1isoform set forth as SEQ ID NO: 279 contains a signal peptide between amino acids 1-26, four immunoglobulin-like domains between amino acids 38-129, 149-224, 243-329, and 348-425. In addition, the exemplary VEGFR-1 isoform contains a partial immunoglobulin domain between amino acids 439-560 lacking amino acids 522 to 553 corresponding to the fifth Ig-like domain of a cognate VEGFR1, and does not contain the sixth and seventh Ig-like domains, a transmembrane domain and protein kinase domain compared to a cognate VEGFR-1 (e.g. SEQ ID NO:426).

[0341] A VEGFR-1 isoform provided herein, or allelic variations thereof, can include a fusion with tPA, such as substitution of an endogenous signal sequence with all or part of a tPA pre/prosequence. For the exemplary VEGFR-1 isoform provided herein as SEQ ID NO: 279, the endogenous signal sequence containing amino acids 1-26 of the VEGFR-1 isoform can be replaced by a tPA pre/prosequence, such as for example, the exemplary tPA pre/prosequence set forth as SEQ ID NO: 2 and encoded by a tPA pre/prosequence set forth as SEQ ID NO: 1. For example, the nucleic acid sequence of an exemplary tPA-VEGFR-1 intron fusion protein fusion set forth in SEQ ID NO:31, and encoding a polypeptide set forth in SEQ ID NO:32, can include the nucleic acid sequence encoding amino acids 27-541 of the VEGFR-1 isoform set forth in SEQ ID NO: 279 operatively linked at 5′ end to a sequence containing a tPA pre/prosequence (nucleotides 1-105 of SEQ ID NO:31) and a sequence containing an Xho I restriction enzyme linker site (nucleotides 136-141 of SEQ ID NO:3 1). Optionally, a sequence of an exemplary tPA-VEGFR-1 intron fusion protein fusion set forth in SEQ ID NO:31, and encoding a polypeptide set forth in SEQ ID NO:32, also can include a myc epitope tag set forth as nucleotides 106-135 operatively fused between the tPA pre/prosequence and the Xho I linker site.

[0342] d. tPA-MET Intron Fusion Protein Fusion

[0343] Provided herein are isoforms of MET containing all or part of a pre/prosequence of tPA and optionally a c-myc fusion tag for the improved production of a MET intron fusion protein polypeptide. MET is an RTK for hepatocyte growth factor (HGF), a multifunctional cytokine controlling cell growth, morphogenesis and motility. HGF, a paracrine factor produced primarily by mesenchymal cells, induces mitogenic and morphogenic changes, including rapid membrane ruffling, formation of microspikes, and increased cellular motility. Signaling through MET can increase tumorigenicity, induce cell motility and enhance invasiveness in vitro and metastasis in vivo. MET signaling also can increase the production of protease and urokinase, leading to extracellular matrix/basal membrane degradation, which are important for promoting tumor metastasis.

[0344] MET is an RTK that is highly expressed in hepatocytes. MET is comprised of two disulfide-linked subunits, a 50-kDa α subunit and a 145-kDa β subunit. In the fully processed MET protein, the a subunit is extracellular, and the β subunit has extracellular, transmembrane, and tyrosine kinase domains. The ligand for MET is hepatocyte growth factor (HGF). Signaling through FGF and MET stimulates mitogenic activity in hepatocytes and epithelial cells, including cell growth, motility and invasion. As with other RTKs, these properties link MET to oncogenic activities. In addition to a role in cancer, MEt also has been shown to be a critical factor in the development of malaria infection. Activation of MET is required to make hepatocytes susceptible to infection by malaria, thus MET is a prime target for prevention of the disease.

[0345] The MET receptor (GenBank No. NP_{—}000236 set forth as SEQ ID NO:414) is characterized by a signal sequence between amino acids 1-24 and a Sema domain between amino acids 55-500. In addition to MET, the Sema domain occurs in semaphorins, which are a large family of secreted and transmembrane proteins, some of which function as repellent signals during axon guidance. In MET, the Sema domain is involved in receptor dimerization in addition to ligand binding. The MET protein also is characterized by a plexin cysteine rich repeat between amino acids 519-562 and three IPT/TIG domains between amino acids 563-655, amino acids 657-739 and amino acids 742-836. IPT stands for Immunoglobulin-like fold shared by Plexins and Transcription factors. TIG stands for the Immunoglobulin-like domain in transcription factors (Transcription factor IG). TIG domains in MET likely play a role in mediating some of the interactions between the extracellular matrix and receptor signaling. The MET protein also is characterized by a transmembrane domain between amino acids 951-973 and a cytoplasmic protein kinase domain between amino acids 1078-1337.

[0346] Exemplary MET isoforms provided herein contain one or more domains of a wildtype or predominant form of MET receptor (e.g. set forth as SEQ ID NO:414). For example, an exemplary MET receptor isoform set forth as SEQ ID NOS: 214 contains a signal peptide between amino acids 1-26, a complete Sema domains, a complete plexin cysteine rich repeat domains, and three complete IPT/TIG domains. In addition, exemplary isoforms of MET provided herein can lack one or more domains or a part thereof compared to a cognate MET receptor such as set forth in SEQ ID NO:414. An exemplary MET receptor isoforms provided herein (e.g. SEQ ID NOS: 214) lack a transmembrane domain and a protein kinase domain.

[0347] MET isoforms, including MET isoforms herein, can include allelic variation in the MET polypeptide. For example, a MET isoform can include one or more amino acid differences present in an allelic variant of a cognate MET, such as for example, one or more amino acid changes compared to SEQ ID NO:414. For example, one or more amino acid variations can occur in the Sema domain of MET. An allelic variant can include amino acid changes at position 113 where, for example, K can be replaced by R, or at position 114 where, for example, D can be replaced by N, or at position 145 where, for example, V can be replaced by A, or at position 148 where, for example, H can be replaced by R, or at position 151 where, for example, T can be replaced by P, or at position 158 where, for example, V can be replaced by A, or at position 168 where, for example, E can be replaced by D, or at position 193 where, for example, I can be replaced by T, or at position 216 where, for example, V can be replaced by L, or at position 237 where, for example, V can be replaced by A, or at position 276 where, for example, T can be replaced by A, or at position 314 where, for example, F can be replaced by L, or at position 337 where, for example, L can be replaced by P, or at position 340 where, for example, D can be replaced by V, or at position 382 where, for example, N can be replaced by D, or at position 400 where, for example, R can be replaced by G, or at position 476 where, for example, H can be replaced by R, or at position 481 where, for example, L can be replaced by M, or at position 500 where, for example, D can be replaced by G. In a further example, one or more amino acid variation can occur in the plexin cysteine rich repeat domain of MET. An allelic variant can include amino acid changes at position 542 where, for example, H can be replaced by Y. In other examples, one or more amino acid variation can occur in the IPT/TIG domains of MET. An allelic variant can include amino acid changes at position 622 where, for example, L can be replaced by S, or at position 720 where, for example, F can be replaced by S, or at position 729 where, for example, A can be replaced by T. In an additional example, one or more amino acid variations can occur in the protein kinase domain of MET. An allelic variant can include amino acid changes at position 1094 where, for example, H can be replaced by R or at position 1100 where, for example, N can be replaced by Y or at position 1230 where, for example, Y can be replaced by C, or at position 1235 where, for example, Y can be replaced with D, or at position 1250 where, for example, M can be replaced by T. Allelic variants also can include one or more amino acid changes, such as at position 37 where, for example, V can be replaced by A, or at position 39 where, for example M can be replaced by T, or at position 42 where, for example, Q can be replaced by R, or at position 501 where, for example, Y can be replaced by H, or at position 511 where, for example, T can be replaced by A. An exemplary MET allelic variant containing one or more amino acid changes described above is set forth as SEQ ID NO: 447. A MET isoform can include one or more allelic variations as set forth in SEQ ID NO:447. An allelic variation can include one or more amino acid change in the Sema domain, such as at positions 113, 114, 145, 148, 151, 158, 168, 193, 216, 237, 276, 314, 337, 340, 382, 400, 476, 481, or 500. Allelic variations also can occur in the plexin cysteine rich repeat domain, such as at position 542. Further allelic variations also can occur in the IPT/TIG domain, such as at positions 622, 720, or 729. Allelic variations also can include other amino acid changes, such as at positions 37, 39, 42, 501, or 511.

[0348] A MET isoform provided herein, or allelic variations thereof, can include a fusion with tPA, such as substitution of an endogenous signal sequence with all or part of a tPA pre/prosequence. For the exemplary MET isoform provided herein as SEQ ID NO: 214, amino acids 1-25 of the MET isoform, including the endogenous signal sequence containing amino acids 1-24, can be replaced by a tPA pre/prosequence, such as for example, the exemplary tPA pre/prosequence set forth as SEQ ID NO: 2 and encoded by a tPA pre/prosequence set forth as SEQ ID NO: 1. For example, the nucleic acid sequence of an exemplary tPA-MET intron fusion protein fusion set forth in SEQ ID NO:33, encoding a polypeptide set forth in SEQ ID NO: 34, can include the nucleic acid sequence encoding amino acids 26-877 of the MET isoform set forth in SEQ ID NO: 214 operatively linked at the 5′ end to a sequence containing a tPA pre/prosequence (nucleotides 1-105 of SEQ ID NO:33) followed by a sequence containing an Xho I restriction enzyme linker site (nucleotides 136-141 of SEQ ID NO:33). Optionally, a sequence of an exemplary tPA-MET intron fusion protein fusion set forth in SEQ ID NO:33, encoding a polypeptide set forth in SEQ ID NO:34, also can include a myc epitope tag set forth as nucleotides 106-135 operatively fused between the tPA pre/prosequence and the Xho I linker site.

[0349] e. tPA-RON Intron Fusion Protein Fusion

[0350] Provided herein are isoforms of RON (recepteur d'origine nantais; also known as macrophage stimulating 1 receptor) containing all or part of a pre/prosequence of tPA and optionally a c-myc fusion tag for the improved production of a RON intron fusion protein polypeptide. RON is a member of the MET subfamily of RTKs. A ligand for RON is macrophage-stimulating protein (MSP). RON is expressed in cells of epithelial origin. RON plays a role in epithelial cancers including lung cancer and colon cancers. RON and MET are expressed in ovarian cancers and are suggested to confer a selective advantage to cancer cells, thus promoting cancer progression. RON also is overexpressed in certain colorectal cancers. Germline mutations in the RON gene have been linked to human tumorigenesis. RON isoforms can be used to modulate RON, such as by modulating RON activity in diseases and conditions where RON is overexpressed.

[0351] The RON protein (GenBank No. NP_{—}002438 set forth as SEQ ID NO:415) contains a signal sequence between amino acids 1-24. RON also is characterized by a Sema domain between amino acids 58-507, a plexin cysteine rich domain between amino acids 526-568, three IPT/TIG domains (between amino acids 569-671, amino acids 684-767, and amino acids 770-860), a transmembrane domain between amino acids 960-982 and a cytoplasmic protein kinase domain between amino acids 1082-1341.

[0352] Exemplary RON isoforms lack one or more domains or a part thereof compared to a cognate RON such as set forth in SEQ ID NO:415. For example, an exemplary RON isoform set forth as SEQ ID NO: 223 lacks a transmembrane domain and protein kinase domain. The exemplary RON isoform set forth in SEQ ID NO: 223 contains a complete Sema domain, plexin cysteine rich domain, and three IPT/TIG domains.

[0353] RON isoforms, including RON isoforms provided herein, can include allelic variation in the RON polypeptide. For example, a RON isoform can include one or more amino acid differences present in an allelic variant of a cognate RON, such as for example, one or more amino acid changes compared to SEQ ID NO:415. For example, one or more amino acid variations can occur in the Sema domain of RON. An allelic variant can include single nucleotide polymorphisms (SNP) at position 113 (SNP No. 3733136) where, for example, G can be replaced by S, or at position 209 where, for example, G can be replaced by A, or at position 322 (SNP No.2230593) where, for example, Q can be replaced by R, or at position 440 (SNP No.2230592) where, for example, N can be replaced by S. An amino acid variation also can occur at position 523 (SNP No.2230590) where, for example, R can be replaced by Q, or at position 946 (SNP No.13078735) where, for example V can be replaced by M. Additionally, one or more amino acid variations can occur in the protein kinase domain of RON. An allelic variant can include amino acid changes at position 1195 (SNP No.7433231) where, for example, G can be replaced by S, or at position 1335 (SNP No.1062633) where, for example, R can be replaced by G, or at position 1232 where, for example, D can be replaced by V, or at position 1254 where, for example, M can be replaced by T. An exemplary RON allelic variant containing one or more amino acid changes described above is set forth as SEQ ID NO: 448 and RON isoform can include any one or more amino acid differences in an allelic variant, such as set forth in SEQ ID NO:448. An allelic variant can include one or more amino acid changes in the SEMA domain, such as at positions 113, 209, 322, or 440. An allelic variant also can include one or more amino acid change, such as at position 523.

[0354] A RON isoform provided herein, or allelic variations thereof, can include a fusion with tPA, such as substitution of an endogenous signal sequence with all or part of a tPA pre/prosequence. For the exemplary RON isoform provided herein as SEQ ID NO:223, amino acids 1-25 of the RON isoform, including the endogenous signal sequence containing amino acids 1-24, can be replaced by a tPA pre/prosequence, such as for example, the exemplary tPA pre/prosequence set forth as SEQ ID NO: 2 and encoded by a tPA pre/prosequence set forth as SEQ ID NO: 1. For example, the nucleic acid sequence of an exemplary tPA-RON intron fusion protein fusion set forth in SEQ ID NO:47, encoding a polypeptide set forth in SEQ ID NO: 48, can include the nucleic acid sequence encoding amino acids 26-908 of the RON isoform set forth in SEQ ID NO:223 operatively linked at the 5′ end to a sequence containing a tPA pre/prosequence (nucleotides 1-105 of SEQ ID NO:47) followed by a sequence containing an Xho I restriction enzyme linker site (nucleotides 136-141 of SEQ ID NO:47). Optionally, a sequence of an exemplary tPA-RON intron fusion protein fusion set forth in SEQ ID NO:47, encoding a polypeptide set forth in SEQ ID NO:48, also can include a myc epitope tag set forth as nucleotides 106-135 operatively fused between the tPA pre/prosequence and the Xho I linker site.

[0355] f. tPA-HER2 Intron Fusion Protein Fusion

[0356] Provided herein are isoforms of HER2 containing all or part of a pre/prosequence of tPA and optionally a Poly-His fusion tag for the improved production of a HER2 intron fusion protein polypeptide. The human epidermal growth factor receptor 2 gene (HER2; also referred to as ErbB2, NEU, NGL) encodes a receptor tyrosine kinase that has been implicated as an oncogene. HER2 has a major mRNA transcript of 4.5 Kb that encodes a polypeptide of about 185 kDa (p185HER2). HER2 is a member of the human epidermal growth factor receptor (HER) family which also included HER1, HER3, and HER4. Ligands for HER1, HER3, and HER4 include HER1 itself, transforming growth factor-α, amphiregulin, betacellulin, and heregulin. A ligand for HER2 has not been identified, however, HER2 is the preferred heterodimerization partner of the other HER family members thereby enhancing their affinities for their ligands and amplifying their signals. HER2 is overexpressed in 25-30% of human breast and 8-11% of human ovarian cancers.

[0357] HER2 (GenBank # NP_{—}004439, set forth as SEQ ID NO:408), like other HER family members, is a type I RTK. The type I RTKs contain an extracellular domain, a singly hydrophobic transmembrane segment, and a cytoplasmic tyrosine kinase domain. The extracellular domains of type I RTKs, including HER2, have been divided into four domains: I (between amino acids 23-217), II (between amino acids 218-342), III (between amino acids 342-500), and IV (between amino acids 501-582). The extracellular region contains four domains arranged as a tandem repeat of a two-domain unit consisting of a ˜190-amino acid L domain referred to as EGFR-like domain since the major determinants for EGF binding lie in domain III of EGFR (domains I and III) followed by a ˜120-amino acid cysteine-rich domain or a furin-like domain (domains II and IV). Specifically, HER2 is characterized by a signal sequence between amino acids 1-22, two Receptor L domains (also called EGFR-like domains) between amino acids 52-173 and 366-486, a furin-like domain between amino acids 189-343, a transmembrane domain between amino acids 633-654, and an intracellular cytoplasmic domain between amino acids 655-1234 with a protein kinase domain between amino acids 720-987.

[0358] Several isoforms of HER2 are produced and include polypeptides generated by proteolytic processing and forms generated from alternatively spliced RNAs. Among HER2 isoforms are those designated as herstatins. Herstatins and fragments thereof are HER2 binding proteins, encoded by the HER2 gene. Herstatins (also referred to as p68HER-2) are encoded by an alternatively spliced variant of the gene encoding the p185-HER2 receptor, and retain an intron 8 portion of a HER2 gene. For example, one herstatin occurs in fetal kidney and liver, and includes a 79 amino acid intron-encoded insert, relative to the membrane-localized receptor, at the C terminus (see e.g., U.S. Pat. No. 6,414,130 and U.S. Published Application No. 20040022785). Several herstatin variants have been identified (see, e.g., U.S. Pat. No. 6,414,130; U.S. Published Application No. 20040022785, U.S. application Ser. No. 09/234,208; U.S. application Ser. No.09/506,079; published international application Nos. WO0044403 and WO0161356).

[0359] Exemplary HER2 isoforms provided herein contain one or more domains of a wildtype or predominant form of a HER2 cognate receptor (e.g. set forth as SEQ ID NO:408). For example, an exemplary HER2 herstatin isoform, set forth in SEQ ID NO:289, provided herein (for example Dimercept™ Herstatin), contains part of the extracellular domain, typically the first 340 amino acids, of HER2. Herstatins contain a signal peptide between amino acids 1-22, and subdomains I and II and part of domain III between amino acids 341 and 419 (termed IIIa subdomain) of the HER2 extracellular domain and a C-terminal domain encoded by an intron. The resulting herstatin polypeptides typically contain 419 amino acids (340 amino acids including subdomains I and II of the extracellular domain, plus 79 amino acids from intron 8). The herstatin proteins lack extracellular domain IV, as well as the transmembrane domain and kinase domain.

[0360] Herstatin binds to HER2, but does not activate the receptor. Herstatins can inhibit members of the EGF-family of receptor tyrosine kinases as well as the insulin-like growth factor-1 (IGF-1) receptor and other receptors. Herstatins prevent the formation of productive receptor dimers (homodimers and heterodimers) required for transphosphorylation and receptor activation. Alternatively or additionally, herstatin can compete with a ligand for binding to the receptor terminus (see e.g., U.S. Pat. No. 6,414,130; U.S. Published Application No. 20040022785, U.S. application Ser. No. 09/234,208; U.S. application Ser. No.09/506,079; published international application Nos. WO0044403 and WO0161356).

[0361] HER2 isoforms, including herstatin isoforms provided herein, can include allelic variation in the HER2 polypeptide. For example, a herstatin isoform can include one or more amino acid differences present in an allelic variant of a cognate HER2, such as for example, one or more amino acid changes compared to SEQ ID NO:408. For example, one or more amino acid variations can occur in a Receptor L domain of HER2. An allelic variant can include amino acid changes at position 452 where, for example, W can be replaced C. Other allelic variations can occur in the intracellular cytoplasmic domain, such as for example, at position 654 where, for example, I can be replaced by V, or at position 655 where, for example, I can be replaced by V, or at position 1170 where, for example, P can be replaced by A. An exemplary HER2 allelic variant containing one or more amino acid changes described above is set forth as SEQ ID NO: 442. A HER2 isoform, including a herstatin, can include any one or more allelic variations of a HER2, such as for example, allelic variations as set forth in SEQ ID NO:442.

[0362] Additionally, herstatin isoforms provided herein can include allelic variation in the intron 8 portion of a herstatin polypeptide such as for example, one or more amino acid changes compared to SEQ ID NO:319. For example, an allelic variant can include amino acid changes at position 2 where, for example, T can be replaced by S, or at position 5 where, for example L can be replaced by P, or at position 6, where for example, P can be replaced by L, or at position 16 where, for example, L can be replaced by Q, or at position, or at position 18, where for example M can be replaced by L or I, or at position 21, where for example G can be replaced by D, A, or V, or at position 36, where, for example L can be replaced by I, or at position 54 where, for example, P can be replaced by R, or at position 64 where, for example, P can be replaced by L, or at position 73 where, for example, D can be replaced by H or N, or at position 17 where, for example, R can be replaced by C, or at position 31 where, for example, R can be replaced by I. A herstatin variant also can include any one or more of the amino acid variations in the intron 8 portion of a herstatin as set forth above. A summary of allelic variations that can occur in a herstatin, or an intron 8 portion thereof, is set forth below in Table 7, with SEQ ID NOS: indicated in parentheses. An exemplary intron 8 containing any one or more amino acid changes as described above is set forth in SEQ ID NO:320-333, and a herstatin allelic variant containing any one or more amino acid changes in the intron 8 encoded portion is set forth in SEQ ID NO:290-303. A herstatin isoform can include any one or more amino acid variations as set forth in any one of SEQ ID NO: 290-303.

TABLE 7
Herstatin variants and intron 8 variants thereof

| Intron 8 Variant | | Herstatin Variant | |
|---|---|---|---|
| Nucleotide | Amino Acid | Nucleotide | Amino Acid |
| Prominent (334) | Prominent (319) | Prominent (304) | Prominent (289) |
| nt 4 = T (335) | aa 2 = Ser (320) | nt 1036 = T (305) | aa 342 = Ser (290) |
| nt 14 = C (336) | aa 5 = Pro (321) | nt 1046 = C (306) | aa 345 = Pro (291) |
| nt 17 = T (337) | aa 6 = Leu (322) | nt 1049 = T (307) | aa 346 = Leu (292) |
| nt 47 = A (338) | aa 16 = Gln (323) | nt 1079 = A (308) | aa 356 = Gln (293) |
| nt 49 = T (339) | aa 17 = Cys (324) | nt 1081 = T (309) | aa 357 = Cys (294) |
| nt 52 = C (340) | aa 18 = Leu (325) | nt 1084 = C (310) | aa 358 = Leu (295) |
| n 54 = A (341) | aa 18 = Ile (326) | nt 1086 = A (311) | aa 358 = Ile (296) |
| nt 62 = C, T, A (342) | aa 21 = Asp, Ala, | nt 1094 = C, T, A (312) | aa 361 = Asp, Ala, |
| | Val (327) | | Val (297) |
| nt 92 = T (343) | aa 31 = Ile (328) | nt 1124 = T (313) | aa 371 = Ile (298) |
| nt 106 = A (344) | aa 36 = Ile (329) | nt 1138 = A (314) | aa 376 = Ile (299) |
| nt 161 = G (345) | aa 54 = Arg (330) | nt 1193 = G (315) | aa 394 = Arg (300) |
| nt 191 = T (346) | aa 64 = Leu (331) | nt 1223 = T (316) | aa 404 = Leu (301) |
| nt 217 = C or A | aa 73 = His or Asn | nt 1249 = C or A | aa 413 = His or |
| (347) | (332) | (317) | Asn (302) |
| nt 17 = T and nt | aa 6 = Leu and aa | nt 1049 = T and nt | aa 346 = Leu and |
| 217 = C or A | 73 = His or Asn | 1249 = C or A | aa 413 = His or |
| (348) | (333) | (318) | Asn (303) |

[0363] A herstatin isoform provided herein, or allelic variations thereof, can include a fusion with tPA, such as substitution of an endogenous signal sequence with all or part of a tPA pre/prosequence. For the exemplary herstatin isoform provided herein as SEQ ID NO: 289 (also called Dimercept™), amino acids 1-23 of the herstatin isoform, including the endogenous signal sequence containing amino acids 1-22, can be replaced by a tPA pre/prosequence, such as for example, the exemplary tPA pre/prosequence set forth as SEQ ID NO: 2 and encoded by a tPA pre/prosequence set forth as SEQ ID NO: 1. For example, the nucleic acid sequence of an exemplary tPA-herstatin intron fusion protein fusion set forth in SEQ ID NO:37, encoding a polypeptide set forth in SEQ ID NO:38, can include the nucleic acid sequence encoding amino acids 24-419 of the herstatin isoform set forth in SEQ ID NO: 289 operatively linked at the 5′ end to a sequence containing a tPA pre/prosequence (nucleotides 1-105 of SEQ ID NO:37) followed by a sequence containing an Xba I restriction enzyme linker site (nucleotides 106-111 of SEQ ID NO:37). Optionally, a sequence of an exemplary tPA-herstatin intron fusion protein fusion set forth in SEQ ID NO:37, encoding a polypeptide set forth in SEQ ID NO:38, also can include a 8X Poly-His epitope tag set forth as nucleotides 112-135 operatively fused between the Xba I linker site and the sequence of a herstatin.

[0364] g. tPA-RAGE Intron Fusion Protein Fusion

[0365] Provided herein are isoforms of RAGE containing all or part of a pre/prosequence of tPA and optionally a c-myc fusion tag for the improved production of a RAGE intron fusion protein polypeptide. RAGE is a cell-surface receptor that is a member of the immunoglobulin family. RAGEs interact with a variety of macromolecular ligands. For example, glycated adducts of macromolecules, such as glycated proteins and lipids produced by non-enzymatic glycation interact with RAGEs. These glycated adducts, also known as advanced glycation endproducts (AGEs) accumulate in cells and tissues during the normal aging process. Enhanced and/or accelerated accumulation of AGEs occurs in sites of inflammation, in renal failure, under hyperglycemic conditions and conditions of systemic or local oxidative stress. Accumulation can occur in tissues such as vascular tissues. For example AGEs accumulate as AGE-β2-microglobulin in patients with dialysis-related amyloidosis and in vasculature and tissues of diabetes patients. RAGE can bind to additional ligands including S100/calgranulins, β-sheet fibrils, amyloid β peptide, Aβ, amylin, serum amyloid A, prion-derived peptides and amphoterin. S100/calgranulins are cytokine-like pro-inflammatory molecules. S100 proteins (S100P) participate in calcium dependent regulation and other signal transduction pathways. S100P forms S100A12 and S100B are extracellular and can bind to RAGE. S100Ps are expressed in a restricted pattern that includes expression in placental and esophageal epithelial cells. S100Ps also are expressed in cancer cells, including breast cancer, colon cancer, prostate cancer, and pancreatic adenocarcinoma. Amphoterin is a polypeptide of approximately 30 kDa, that is expressed in the nervous system. It also is expressed in transformed cells such as c6 glioma cells, HL-60 promyelocytes, U937 promonocytes, HT1080 fibrosarcoma cells and B16 melanoma cells (Hori et al. (1995) J Bio. Chem. 270:25752-61).

[0366] The RAGE polypeptide (Genbank NP_{—}001127, SEQ ID NO:421) contains a number of domains. It has a signal peptide located at the N-terminus. For example, in the exemplary full-length RAGE polypeptide set forth herein as SEQ ID NO:421 and encoded by SEQ ID NO:384, the signal peptide is located at amino acids 1-22. RAGE contains a transmembrane domain. In the exemplary full-length RAGE polypeptide set forth herein as SEQ ID NO:421, the transmembrane domain is between amino acids 343 and 363. RAGE also contains three immunoglobulin-like (Ig-like) domains on the N-terminal side from the transmembrane domain. In the exemplary full-length RAGE polypeptide set forth herein as SEQ ID NO:421, the Ig-like domains are located at amino acids 23-116, 124-221 and 227-317. The first of the Ig-like domains (amino acids 23-116 of SEQ ID NO:421) is a variable-type (V-type) Ig-like domain, whereas the other two Ig-like like domains are characterized as similar to constant regions (C-type). The V-type Ig-like domain can mediate interaction with ligands, such as AGEs (Kislinger et al. (1999(J. Biol. Chem. 274: 31740-49). The C-terminus of the RAGE protein is intracellular. In the exemplary full-length RAGE polypeptide set forth herein as SEQ ID NO:421, the C-terminus encompasses amino acids 364-404. The C-terminus participates in RAGE-mediated signal transduction (Ding et al. (2005) Neuroscience letters 373:67-72).

[0367] Exemplary RAGE isoforms provided herein lack one or more domains or parts of one or more domains of RAGE Among the RAGE isoforms provided herein is isoform C02, set forth as SEQ ID NO:237, encoded by a nucleic acid sequence set forth as SEQ ID NO:236. C02 contains 266 amino acids. This isoform includes an N-terminal signal sequence at amino acids 1-22, followed by a V-type Ig-like domain at amino acids 23-116 and one C-type Ig-like domain at amino acids 124-237. It lacks a second C-type Ig-like domain except for the first 4 amino acids (amino acids 243-246) corresponding to amino acids 227-230 of SEQ ID NO:421. In addition, the first C-type Ig-like domain included in C02 contains a disruption. An additional 16 amino acids are inserted; these 16 amino acids are positions 142-157 of SEQ ID NO:237. The insertion point for these amino acids corresponds to amino acids 141-142 of SEQ ID NO:421. C02 isoform contains an additional 20 amino acids at the C-terminus of the polypeptide, amino acids 247-266, that are not present in the cognate RAGE.

[0368] RAGE isoforms, including RAGE isoforms herein, can include allelic variation in the RAGE polypeptide. For example, a RAGE isoform can include one or more amino acid differences present in an allelic variant of a cognate RAGE, such as for example, one or more amino acid changes compared to SEQ ID NO:421. For example, one or more amino acid variations can occur in an Ig-like domain of RAGE. An allelic variant can include amino acid changes at position 77 where, for example, R is replaced by C, or at position 82 where, for example, G is replaced by S. In another example, one or more amino acid changes can occur in the C-terminus of RAGE. An allelic variant can include amino acid changes at position 369 where, for example, R can be replaced by Q, or at position 365 where, for example, R can be replaced by G, or at position 305 where, for example, H can be replaced by Q, or at position 307 where, for example, S can be replaced by C. An exemplary RAGE allelic variant containing one or more amino acid changes described above is set forth as SEQ ID NO: 453. A RAGE isoform can include one or more allelic variations as set forth in SEQ ID NO:453. An allelic variation can include one or more amino acid change in an Ig-like domain, such as at positions 77 or 82.

[0369] A RAGE isoform provided herein, or allelic variations thereof, can include a fusion with tPA, such as substitution of an endogenous signal sequence with all or part of a tPA pre/prosequence. For the exemplary RAGE isoform provided herein as SEQ ID NO: 237 amino acids 1-23 of the RAGE isoform, including the endogenous signal sequence containing amino acids 1-22, can be replaced by a tPA pre/prosequence, such as for example, the exemplary tPA pre/prosequence set forth as SEQ ID NO: 2 and encoded by a tPA pre/prosequence set forth as SEQ ID NO:1. For example, the nucleic acid sequence of an exemplary tPA-RAGE intron fusion protein fusion set forth in SEQ ID NO:43, encoding a polypeptide set forth in SEQ ID NO: 44, can include the nucleic acid sequence encoding amino acids 23-266 of the RAGE isoform set forth in SEQ ID NO: 237 operatively linked at the 5′ end to a sequence containing a tPA pre/prosequence (nucleotides 1-105 of SEQ ID NO:43) followed by a sequence containing an Xho I restriction enzyme linker site (nucleotides 136-141 of SEQ ID NO:43). Optionally, a sequence of an exemplary tPA-RAGE intron fusion protein fusion set forth in SEQ ID NO:43, encoding a polypeptide set forth in SEQ ID NO:44, also can include a myc epitope tag set forth as nucleotides 106-135 operatively fused between the tPA pre/prosequence and the Xho I linker site.

[0370] h. tPA-TEK Intron Fusion Protein Fusion

[0371] Provided herein are isoforms of TEK (also called Tie-2) containing all or part of a pre/prosequence of tPA and optionally a c-myc fusion tag for the improved production of a TEK intron fusion protein polypeptide. The known ligands for TEK include angiopoietin (Ang)-1 and Ang-2. The TIE RTKs (including Tie-1 and TEK) play important roles in the development of the embryonic vasculature and continue to be expressed in adult endothelial cells. TEK is an RTK that is expressed almost exclusively by vascular endothelium. Expression of TEK is important for the development of the embryonic vasculature. Overexpression and/or mutation of TEK has been linked to pathogenic angiogenesis, and thus tumor growth, as well as myeloid leukemia.

[0372] The TEK protein (GenBank No. NP_{—}000450 set forth as SEQ ID NO:423) contains a signal sequence between amino acids 1-18. TEK also is characterized by a laminin EGF-like domain between amino acids 219-268, three fibronectin type III domains (between amino acids 444-529, amino acids 543-626, and amino acids 639-724), a transmembrane domain between amino acids 748-770, and a cytoplasmic protein kinase domain between amino acids 824-1092.

[0373] Exemplary TEK isoforms lack one or more domains or a part thereof compared to a cognate TEK such as set forth in SEQ ID NO:423. For example, exemplary TEK isoforms, such as set forth in SEQ ID NO: 245, can lack a transmembrane domain and kinase domain. TEK isoforms also can contain other domains of a TEK cognate receptor. For example, the exemplary TEK isoform set forth as SEQ ID NO: 245 contains a signal sequence between amino acids 1-18, a laminin EGF-like domain between amino acids 219-268, but is missing the three fibronectin type III domains.

[0374] TEK isoforms, including TEK isoforms provided herein, can include allelic variation in the TEK polypeptide. For example, a TEK isoform can include one or more amino acid differences present in an allelic variant of a cognate TEK, such as for example, any one or more amino acid changes compared to SEQ ID NO:423. For example, one or more amino acid variations can occur in a fibronectin type III domain of TEK. An allelic variant can include a single nucleotide polymorphism (SNP) at position 486 (SNP No: 1334811) where, for example, V can be replaced by I, or at position 695 where, for example, I can be replaced by T, or at position 724 (SNP No. 4631561) where, for example, A can be replaced by T. An allelic variant also can occur in the protein kinase domain of TEK. An allelic variant can include amino acid changes at position 849 where, for example, R can be replaced by W. An amino acid variation also can occur at position 346 where, for example, P can be replaced by Q. An exemplary TEK allelic variant containing one or more amino acid changes described above is set forth as SEQ ID NO: 454 and a TEK isoform can include one or more amino acid differences present in an allelic variant of a cognate TEK, such as set forth in SEQ ID NO: 454. An allelic variant of a TEK isoform can include one or more amino acid changes in the fibronectin type III domain, such as at position 486 or 695. An allelic variant of a TEK isoform also can include one or more amino acid changes, such as at position 346.

[0375] A TEK isoform provided herein, or allelic variations thereof, can include a fusion with tPA, such as substitution of an endogenous signal sequence with all or part of a tPA pre/prosequence. For the exemplary TEK isoform provided herein as SEQ ID NO: 245 amino acids 1-19 of the TEK isoform, including the endogenous signal sequence containing amino acids 1-18, can be replaced by a tPA pre/prosequence, such as for example, the exemplary tPA pre/prosequence set forth as SEQ ID NO: 2 and encoded by a tPA pre/prosequence set forth as SEQ ID NO:1. For example, the nucleic acid sequence of an exemplary tPA-TEK intron fusion protein fusion set forth in SEQ ID NO:45, encoding a polypeptide set forth in SEQ ID NO: 46, can include the nucleic acid sequence encoding amino acids 20-367 of the TEK isoform set forth in SEQ ID NO: 245 operatively linked at the 5′ end to a sequence containing a tPA pre/prosequence (nucleotides 1-1 05 of SEQ ID NO:45) followed by a sequence containing an Xho I restriction enzyme linker site (nucleotides 136-141 of SEQ ID NO:45). Optionally, a sequence of an exemplary tPA-TEK intron fusion protein fusion set forth in SEQ ID NO:45, encoding a polypeptide set forth in SEQ ID NO:46, also can include a myc epitope tag set forth as nucleotides 106-135 operatively fused between the tPA pre/prosequence and the Xho I linker site.

E. Methods of Producing Nucleic Acid Encoding Isoform Fusion Polypeptides

[0376] Exemplary methods for generating isoform fusion nucleic acid molecules and polypeptides, including tPA-intron fusion protein fusions described herein, are provided. Such methods include in vitro synthesis methods for nucleic acid molecules such as PCR, synthetic gene construction and in vitro ligation of isolated and/or synthesized nucleic acid fragments. Nucleic acid molecules for CSR or ligand isoform fusions also can be isolated by cloning methods, including PCR of RNA and DNA isolated from cells and screening of nucleic acid molecule libraries by hybridization and/or expression screening methods.

[0377] CSR or ligand isoform polypeptides can be generated from CSR or ligand isoform nucleic acid molecules using in vitro and in vivo synthesis methods. Isoforms, including isoform fusions such as tPA-intron fusion protein fusions, can be expressed in any organism suitable to produce the required amounts and forms of isoform needed for administration and treatment. Expression hosts include prokaryotic and eukaryotic organisms such as E. coli, yeast, plants, insect cells, mammalian cells, including human cell lines and transgenic animals. CSR isoforms also can be isolated from cells and organisms in which they are expressed, including cells and organisms in which isoforms are produced recombinantly and those in which isoforms are synthesized without recombinant means such as genomically-encoded isoforms produced by alternative splicing events.

[0378] 1. Synthetic Genes and Polypeptides

[0379] Nucleic acid molecules encoding CSR or ligand isoform polypeptides can be synthesized by methods known to one of skill in the art using synthetic gene synthesis. In such methods, a polypeptide sequence of an isoform is “back-translated” to generate one or more nucleic acid molecules encoding an isoform. The back-translated nucleic acid molecule is then synthesized as one or more DNA fragments such as by using automated DNA synthesis technology. The fragments are then operatively linked to form a nucleic acid molecule encoding an isoform. Isoform fusions can be generated by joining nucleic acid molecules encoding an isoform with additional nucleic acid molecules such as a heterologous or homologous precursor sequences, epitope or fusion tags, regulatory sequences for regulating transcription and translation, vectors, and other polypeptide-encoding nucleic acid molecules. Isoform-encoding nucleic acid molecules also can be operatively linked with other fusion tags or labels such as for tracking, including radiolabels, and fluorescent moieties.

[0380] The process of back translation uses the genetic code to obtain a nucleotide gene sequence for any polypeptide of interest, such as a CSR or ligand isoform. The genetic code is degenerate, 64 codons specify 20 amino acids and 3 stop codons. Such degeneracy permits flexibility in nucleic acid design and generation, allowing for example, the incorporation of restriction sites to facilitate the linking of nucleic acid fragments and/or the placement of unique identifier sequences within each synthesized fragment. Degeneracy of the genetic code also allows the design of nucleic acid molecules to avoid unwanted nucleotide sequences, including unwanted restriction sites, splicing donor or acceptor sites, or other nucleotide sequences potentially detrimental to efficient translation. Additionally, organisms sometimes favor particular codon usage and/or a defined ratio of GC to AT nucleotides. Thus, degeneracy of the genetic code permits design of nucleic acid molecules tailored for expression in particular organisms or groups of organisms. Additionally, nucleic acid molecules can be designed for different levels of expression based on optimizing (or non-optimizing) of the sequences.

[0381] Back-translation is performed by selecting codons that encode a polypeptide. Such processes can be performed manually using a table of the genetic code and a polypeptide sequence. Alternatively, computer programs, including publicly available software can be used to generate back-translated nucleic acid sequences.

[0382] To synthesize a back-translated nucleic acid molecule, any method available in the art for nucleic acid synthesis can be used. For example, individual oligonucleotides corresponding to fragments of a CSR or ligand isoform-encoding sequence of nucleotides are synthesized by standard automated methods and mixed together in an annealing or hybridization reaction. Such oligonucleotides are synthesized such that annealing results in the self-assembly of the gene from the oligonucleotides using overlapping single-stranded overhangs formed upon duplexing complementary sequences, generally about 100 nucleotides in length. Single nucleotide “nicks” in the duplex DNA are sealed using ligation, for example with bacteriophage T4 DNA ligase. Restriction endonuclease linker sequences can, for example, then be used to insert the synthetic gene into any one of a variety of recombinant DNA vectors suitable for protein expression. In another, similar method, a series of overlapping oligonucleotides are prepared by chemical oligonucleotide synthesis methods. Annealing of these oligonucleotides results in a gapped DNA structure. DNA synthesis catalyzed by enzymes such as DNA polymerase I can be used to fill in these gaps, and ligation is used to seal any nicks in the duplex structure. PCR and/or other DNA amplification techniques can be applied to amplify the formed linear DNA duplex.

[0383] Additional nucleotide sequences can be joined to a CSR or ligand isoform-encoding nucleic acid molecule thereby generating an isoform fusion, including linker sequences containing restriction endonuclease sites for the purpose of cloning the synthetic gene into a vector, for example, a protein expression vector or a vector designed for the amplification of the core protein coding DNA sequences. Furthermore, additional nucleotide sequences specifying functional DNA elements can be operatively linked to an isoform-encoding nucleic acid molecule. Examples of such sequences include, but are not limited to, promoter sequences designed to facilitate intracellular protein expression, or precursor sequences designed to facilitate protein secretion. Other examples of nucleotide sequences that can be operatively linked to an isoform-encoding nucleic acid molecule include sequences that facilitate the purification and/or detection of an isoform. For example, a fusion tag such as an epitope tag or fluorescent moiety can be fused or linked to an isoform. Additional nucleotide sequences such as sequences specifying protein binding regions also can be linked to isoform-encoding nucleic acid molecules. Such regions include, but are not limited to, sequences to facilitate uptake of an isoform into specific target cells, or otherwise enhance the pharmacokinetics of the synthetic gene.

[0384] CSR isoforms also can be synthesized using automated synthetic polypeptide synthesis. Cloned and/or in silico-generated polypeptide sequences can be synthesized in fragments and then chemically linked. Alternatively, isoforms can be synthesized as a single polypeptide. Such polypeptides then can be used in the assays and treatment administrations described herein.

[0385] 2. Methods of Cloning and Isolating Isoforms and Isoform Fusions

[0386] CSR or ligand isoforms, including isoform fusions, can be cloned or isolated using any available methods known in the art for cloning and isolating nucleic acid molecules. Such methods include PCR amplification of nucleic acids and screening of libraries, including nucleic acid hybridization screening, antibody-based screening and activity-based screening.

[0387] Nucleic acid molecules encoding isoforms also can be isolated using library screening. For example, a nucleic acid library representing expressed RNA transcripts as cDNAs can be screened by hybridization with nucleic acid molecules encoding CSR isoforms or portions thereof. For example, an intron sequence or portion thereof from a CSR gene can be used to screen for intron retention-containing molecules based on hybridization to homologous sequences. Expression library screening can be used to isolate nucleic acid molecules encoding a CSR isoform. For example, an expression library can be screened with antibodies that recognize a specific isoform or a portion of an isoform. Antibodies can be obtained and/or prepared which specifically bind a CSR isoform or a region or peptide contained in an isoform. Antibodies which specifically bind an isoform can be used to screen an expression library containing nucleic acid molecules encoding an isoform, such as an intron fusion protein. Methods of preparing and isolating antibodies, including polyclonal and monoclonal antibodies and fragments therefrom are well known in the art. Methods of preparing and isolating recombinant and synthetic antibodies also are well known in the art. For example, such antibodies can be constructed using solid phase peptide synthesis or can be produced recombinantly, using nucleotide and amino acid sequence information of the antigen binding sites of antibodies that specifically bind a candidate polypeptide. Antibodies also can be obtained by screening combinatorial libraries containing of variable heavy chains and variable light chains, or of antigen-binding portions thereof. Methods of preparing, isolating and using polyclonal, monoclonal and non-natural antibodies are reviewed, for example, in Kontermann and Dubel, eds. (2001) “Antibody Engineering” Springer Verlag; Howard and Bethell, eds. (2001) “Basic Methods in Antibody Production and Characterization” CRC Press; and O'Brien and Aitkin, eds. (2001) “Antibody Phage Display” Humana Press. Such antibodies also can be used to screen for the presence of an isoform polypeptide, for example, to detect the expression of a CSR isoform in a cell, tissue or extract.

[0388] Methods for amplification of nucleic acids can be used to isolate nucleic acid molecules encoding an isoform, including for example, polymerase chain reaction (PCR) methods. A nucleic acid containing material can be used as a starting material from which an isoform-encoding nucleic acid molecule can be isolated. For example, DNA and mRNA preparations, cell extracts, tissue extracts, fluid samples (e.g. blood, serum and saliva), samples from healthy and/or diseased subjects can be used in amplification methods. Nucleic acid libraries also can be used as a source of starting material. Primers can be designed to amplify an isoform. For example, primers can be designed based on expressed sequences from which an isoform is generated. Primers can be designed based on back-translation of an isoform amino acid sequence. Nucleic acid molecules generated by amplification can be sequenced and confirmed to encode an isoform.

[0389] 3. Methods of Generating and Cloning Intron Fusion Protein Fusions

[0390] The methods by which DNA sequences can be obtained and linked to provide the DNA sequence encoding the fusion protein are well known in the field of recombinant DNA technology. DNA for a precursor sequence, such as DNA encoding a signal peptide, can be generated by various methods including: synthesis using an oligonucleotide synthesizer; isolation from a target DNA such as from an organism, cell, or vector containing the precursor sequence, by appropriate restriction enzyme digestion; or can be obtained from a target source by PCR of genomic DNA with the appropriate primers. Likewise, the DNA encoding an isoform fusion protein, epitope tag, or other protein to be fused to an isoform can be synthesized using an oligonucleotide synthesizer, isolated from the DNA of a parent cell which produces the protein by appropriate restriction enzyme digestion, or obtained from a target source, such as a cell, tissue, vector, or other target source, by PCR of genomic DNA with appropriate primers. Additionally, a small epitope tag, such as a myc tag, His tag, or other small epitope tag, and/or any other additional DNA sequence such as a restriction enzyme linker sequence or a protease cleavage site sequence can be engineered into a PCR primer sequence for incorporation into a nucleic acid sequence encoding another protein upon PCR amplification for incorporation into the DNA encoding the fusion protein.

[0391] In one example, intron fusion protein fusion sequences can be generated by successive rounds of ligating DNA target sequences, amplified by PCR, into a vector at engineered recombination site. For example, a nucleic acid sequence for an intron fusion protein isoform, fusion tag, and/or a homologous or heterologous precursor sequence can be PCR amplified using primers that hybridize to opposite strands and flank the region of interest in a target DNA. Cells or tissues or other sources known to express a target DNA molecule, or a vector containing a sequence for a target DNA molecule, can be used as a starting product for PCR amplification events. The PCR amplified product can be subcloned into a vector for further recombinant manipulation of a sequence, such as to create a fusion with another nucleic acid sequence already contained within a vector, or for the expression of a target molecule.

[0392] PCR primers used in the PCR amplification also can be engineered to facilitate the operative linkage of nucleic acid sequences. For example, non-template complementary 5′ extension can be added to primers to allow for a variety of post-amplification manipulations of the PCR product without significant effect on the amplification itself. For example, these 5′ extensions can include restriction sites, promoter sequences, sequences for epitope tags, etc. In one example, for the purpose of creating a fusion sequence, sequences that can be incorporated into a primer include, for example, a sequence encoding a myc epitope tag or other small epitope tag, such that the amplified PCR product effectively contains a fusion of a nucleic acid sequence of interest with an epitope tag.

[0393] In another example, incorporation of restriction enzyme sites into a primer can facilitate subdloning of the amplification product into a vector that contains a compatible restriction site, such as by providing sticky ends for ligation of a nucleic acid sequence. Subcloning of multiple PCR amplified products into a single vector can be used as a strategy to operatively link or fuse different nucleic acid sequences. Examples of restriction enzyme sites that can be incorporated into a primer sequence can include, but are not limited to, an Xho I restriction site (CTCGAG, SEQ ID NO:128), an Nhe I restriction site (GCTAGC, SEQ ID NO:130), a Not I restriction site (GCGGCCGC, SEQ ID NO: 131), an EcoR I restriction site (GAATTC, SEQ ID NO:132), or an Xba I restriction site (TCTAGA, SEQ ID NO:129). Other methods for subcloning of PCR products into vectors include blunt end cloning, TA cloning, ligation independent cloning, and in vivo cloning.

[0394] The creation of an effective restriction enzyme site into a primer facilitates the digestion of the PCR fragment with a compatible restriction enzyme to expose sticky ends, or for some restriction enzyme sites, blunt ends, for subsequent subcloning. There are several factors to consider in engineering a restriction enzyme site into a primer so that it retains its compatibility for a restriction enzyme. First, the addition of 2-6 extra bases upstream of an engineered restriction site in a PCR primer can greatly increase the efficiency of digestion of the amplification product. Other methods that can be used to improve digestion of a restriction enzyme site by a restriction enzyme include proteinase K treatment to remove any thermostable polymerase that can block the DNA, end-polishing with Klenow or T4 DNA polymerase, and/or the addition of spermidine. An alternative method for improving digestion efficiency of PCR products also can include concatamerization of the fragments after amplification. This is achieved by first treating the cleaned up PCR product with T4 polynucleotide kinase (if the primers have not already been phosphorylated). The ends may already be blunt if a proofreading thermostable polymerase such as Pfu was used or the amplified PCR product can be treated with T4 DNA polymerase to polish the ends if a non-proofreading enzyme such as Taq is used. The PCR products can be ligated with T4 DNA ligase. This effectively moves the restriction enzyme site away from the end of the fragments and allows for efficient digestion.

[0395] Prior to subcloning of a PCR product containing exposed restriction enzyme sites into a vector, such as for creating a fusion with a sequence of interest, it is sometimes necessary to resolve a digested PCR product from those that remain uncut. In such examples, the addition of fluorescent tags at the 5′ end of a primer can be added prior to PCR. This allows for identification of digested products since those that have been digested successfully will have lost the fluorescent label upon digestion.

[0396] In some instances, the use of amplified PCR products containing restriction sites for subsequent subcloning into a vector for the generation of a fusion sequence can result in the incorporation of restriction enzyme linker sequences in the fusion protein product. Generally such linker sequences are short and do not impair the function of a polypeptide so long as the sequences are operatively linked.

[0397] The nucleic acid molecule encoding an isoform fusion protein can be provided in the form of a vector which comprises the nucleic acid molecule. One example of such a vector is a plasmid. Many expression vectors are available and known to those of skill in the art and can be used for expression of CSR or ligand isoform, including isoform fusions. The choice of expression vector can be influenced by the choice of host expression system. In general, expression vectors can include transcriptional promoters and optionally enhancers, translational signals, and transcriptional and translational termination signals. Expression vectors that are used for stable transformation typically have a selectable marker which allows selection and maintenance of the transformed cells. In some cases, an origin of replication can be used to amplify the copy number of the vector.

[0398] 4. Expression Systems

[0399] CSR and ligand isoforms, including natural and combinatorial intron fusion proteins and isoform fusions provided herein, can be produced by any method known to those of skill in the art including in vivo and in vitro methods. CSR and ligand isoforms and fusion isoforms can be expressed in any organism suitable to produce the required amounts and form of isoform needed for administration and treatment. Generally, any cell type that can be engineered to express heterologous DNA and has a secretory pathway is suitable. Expression hosts include prokaryotic and eukaryotic organisms such as E. coli, yeast, plants, insect cells and mammalian cells, including human cell lines and transgenic animals. Expression hosts can differ in their protein production levels as well as the types of post-translational modifications that are present on the expressed proteins. Further, the choice of expression hosts is often, but not always, dependent on the choice of precursor sequence utilized. For example, many heterologous signal sequences can only be expressed in a host cell of the same species (i.e., an insect cell signal sequence is optimally expressed in an insect cell). In contrast, other signal sequences can be used in heterologous hosts such as, for example, the human serum albumin (hHSA) signal sequence which works well in yeast, insect, or mammalian host cells and the tissue plasminogen activator pre/pro sequence which has been demonstrated to be functional in insect and mammalian cells (Tan et al., (2002) Protein Eng. 15:337). The choice of expression host can be made based on these and other factors, such as regulatory and safety considerations, production costs and the need and methods for purification.

[0400] a. Prokaryotic Expression

[0401] Prokaryotes, especially E. coli, provide a system for producing large amounts of proteins such as isoforms and isoform fusions provided herein. Other microbial strains may also be used, such as bacilli, for example Bacillus subtilus, various species of Pseudomonas, or other bacterial strains. Transformation of bacteria, including E. coli, is a simple and rapid technique well known to those of skill in the art. In such prokaryotic systems, plasmid vectors which contain replication sites and control sequences derived from a species compatible with the host are often used. For example, common vectors for E. coli include pBR322, pUC18, pBAD, and their derivatives. Commonly used prokaryotic control sequences, which contain promoters for transcription initiation, optionally with an operator, along with ribosome binding-site sequences, include such commonly used promoters as the beta-lactamase (penicillinase) and lactose (lac) promoter systems, the tryptophan (trp) promoter system, the arabinose promoter, and the lambda-derived Pl promoter and N-gene ribosome binding site. Any available promoter system compatible with prokaryotes, however, can be used. Expression vectors for E. coli can contain inducible promoters. Such promoters are useful for inducing high levels of protein expression and for expressing proteins that exhibit some toxicity to the host cells. Examples of inducible promoters include the lac promoter, the trp promoter, the hybrid tac promoter, the T7 and SP6 RNA promoters and the temperature regulated λPL promoter.

[0402] Isoforms can be expressed in the cytoplasmic environment of E. coli. The cytoplasm is a reducing environment and for some molecules, this can result in the formation of insoluble inclusion bodies. Reducing agents such as dithiothreotol and β-mercaptoethanol and denaturants, such as guanidine-HCl and urea can be used to resolubilize the proteins. An alternative approach is the expression of CSR or ligand isoforms, including isoform fusions, in the periplasmic space of bacteria which provides an oxidizing environment and chaperonin-like and disulfide isomerases and can lead to the production of soluble protein. Typically, a precursor sequence, such as but not limited to precursor sequences described herein for use in bacteria including an OmpA, OmpF, PelB, or other precursor sequence, is fused to the protein to be expressed, such as by replacing an endogenous precursor sequence, which directs the protein to the periplasm. The leader peptide is then removed by signal peptidases inside the periplasm. Examples of periplasmic-targeting precursor or leader sequences include the PelB leader from the pectate lyase gene and the leader derived from the alkaline phosphatase gene. In some cases, periplasmic expression allows leakage of the expressed protein into the culture medium. The secretion of proteins allows quick and simple purification from the culture supernatant. Proteins that are not secreted can be obtained from the periplasm by osmotic lysis. Similar to cytoplasmic expression, in some cases proteins can become insoluble and denaturants and reducing agents can be used to facilitate solubilization and refolding. Temperature of induction and growth also can influence expression levels and solubility, typically temperatures between 25° C. and 37° C. are used. Typically, bacteria produce aglycosylated proteins. Thus, if proteins require glycosylation for function, glycosylation can be added in vitro after purification from host cells.

[0403] b. Yeast

[0404] Yeasts such as Saccharomyces cerevisae, Schizosaccharomyces pombe, Yarrowia lipolytica, Kluyveromyces lactis and Pichia pastoris are well known yeast expression hosts that can be used for production of CSR isoforms. Yeast can be transformed with episomal replicating vectors or by stable chromosomal integration by homologous recombination. Typically, inducible promoters are used to regulate gene expression. Examples of such promoters include GAL 1, GAL7 and GAL5 and metallothionein promoters, such as CUP1, AOX1 or other Pichia or other yeast promoter. Other yeast promoters include promoters for synthesis of glycolytic enzymes, e.g., those for 3-phosphoglycerate kinase, or those from the enolase gene or the Leu2 gene obtained from Yep13. Expression vectors often include a selectable marker such as LEU2, TRP1, HIS3 and URA3 for selection and maintenance of the transformed DNA. An exemplary expression vector system for use in yeast is the POT1 vector system (see e.g., U.S. Pat. No. 4,931,373), which allows transformed cells to be selected by growth in glucose-containing media. Proteins expressed in yeast are often soluble. Co-expression with chaperonins such as Bip and protein disulfide isomerase can improve expression levels and solubility. Additionally, proteins expressed in yeast can be directed for secretion using secretion signal peptide fusions such as the yeast mating type alpha-factor secretion signal from Saccharomyces cerevisae and fusions with yeast cell surface proteins such as the Aga2p mating adhesion receptor or the Arxula adeninivorans glucoamylase, or any other heterologous or homologous precursor sequence that promotes the secretion of a polypeptide in yeast. A protease cleavage site such as, for example, the Kex-2 protease, can be engineered to remove the fused sequences from the expressed polypeptides as they exit the secretion pathway. Yeast also are capable of glycosylation at Asn-X-Ser/Thr motifs.

[0405] c. Insect Cells

[0406] Insect cells, particularly using baculovirus expression, are useful for expressing polypeptides such as CSR or ligand isoforms, including isoform fusions. Insect cells express high levels of protein and are capable of most of the post-translational modifications used by higher eukaryotes. Baculovirus have a restrictive host range which improves the safety and reduces regulatory concerns of eukaryotic expression. Typical expression vectors use a promoter for high level expression such as the polyhedrin promoter of baculovirus. Commonly used baculovirus systems include the baculoviruses such as Autographa californica nuclear polyhedrosis virus (AcNPV), and the Bombyx mori nuclear polyhedrosis virus (BmNPV) and an insect cell line such as Sf9 derived from Spodoptera frugiperda, Pseudaletia unipuncta (A7S) and Danaus plexippus (DpN1). For high-level expression, the nucleotide sequence of the molecule to be expressed is fused immediately downstream of the polyhedrin initiation codon of the virus. Mammalian secretion signals are accurately processed in insect cells and can be used to secrete the expressed protein into the culture medium. For example, a mammalian tissue plasminogen activator precursor sequence facilitates expression and secretion of proteins by insect cells. In addition, the cell lines Pseudaletia unipuncta (A7S) and Danaus plexippus (DpN1) produce proteins with glycosylation patterns similar to mammalian cell systems.

[0407] An alternative expression system in insect cells is the use of stably transformed cells. Cell lines such as the Schnieder 2 (S2) and Kc cells (Drosophila melanogaster) and C7 cells (Aedes albopictus) can be used for expression. The Drosophila metallothionein promoter can be used to induce high levels of expression in the presence of heavy metal induction with cadmium or copper. Expression vectors are typically maintained by the use of selectable markers such as neomycin and hygromycin.

[0408] d. Mammalian Cells

[0409] Mammalian expression systems can be used to express CSR or ligand isoforms, including isoform fusions provided herein. Expression constructs can be transferred to mammalian cells by viral infection such as by using an adenovirus vector or by direct DNA transfer such as by conventional transfection methods involving liposomes, calcium phosphate, DEAE-dextran and by physical means such as electroporation and microinjection. Exemplary expression vectors include, fore example pCI expression plasmid (Promega, SEQ ID NO:50), or the pcDNA3.1 expression plasmid (Invitrogen, SEQ ID NO:51). Expression vectors for mammalian cells typically include an mRNA cap site, a TATA box, a translational initiation sequence (Kozak consensus sequence) and polyadenylation elements. Such vectors often include transcriptional promoter-enhancers for high-level expression, for example the SV40 promoter-enhancer, the human cytomegalovirus (CMV) promoter, such as the hCMV-MIE promoter-enhancer, and the long terminal repeat of Rous sarcoma virus (RSV), or other viral promoters such as those derived from polyoma, adenovirus II, bovine papilloma virus or avian sarcoma viruses. Additional suitable mammalian promoters include the β-actin promoter-enhancer and the human metallothionein II promoter. These promoter-enhancers are active in many cell types. Tissue and cell-type promoters and enhancer regions also can be used for expression. Exemplary promoter/enhancer regions include, but are not limited to, those from genes such as elastase I, insulin, immunoglobulin, mouse mammary tumor virus, albumin, alpha fetoprotein, alpha-1-antitrypsin, beta globin, myelin basic protein, myosin light chain 2, and gonadotropic releasing hormone gene control. Selectable markers can be used to select for and maintain cells with the expression construct. Examples of selectable marker genes include, but are not limited to, hygromycin B phosphotransferase, adenosine deaminase, xanthine-guanine phosphoribosyl transferase, aminoglycoside phosphotransferase, dihydrofolate reductase and thymidine kinase. Fusion with cell surface signaling molecules such as TCR-ζ and Fc_{ε}RI-γ can direct expression of the proteins in an active state on the cell surface.

[0410] Many cell lines are available for mammalian expression including mouse, rat human, monkey, chicken and hamster cells. Exemplary cell lines include, but are not limited to, CHO, Balb/3T3, HeLa, MT2, mouse NS0 (nonsecreting) and other myeloma cell lines, hybridoma and heterohybridoma cell lines, lymphocytes, fibroblasts, Sp2/0, COS, NIH3T3, HEK293, 293T, 293S, 2B8, and HKB cells. Cell lines also are available adapted to serum-free media which facilitates purification of secreted proteins from the cell culture media. One such example is the serum free EBNA-1 cell line (Pham et al., (2003) Biotechnol. Bioeng. 84:332-42.)

[0411] e. Plants

[0412] Transgenic plant cells and plants can be used to express CSR isoforms. Expression constructs are typically transferred to plants using direct DNA transfer such as microprojectile bombardment and PEG-mediated transfer into protoplasts, and with agrobacterium-mediated transformation. Expression vectors can include promoter and enhancer sequences, transcriptional termination elements and translational control elements. Expression vectors and transformation techniques are usually divided between dicot hosts, such as Arabidopsis and tobacco, and monocot hosts, such as corn and rice. Examples of plant promoters used for expression include the cauliflower mosaic virus promoter, the nopaline synthase promoter, the ribose bisphosphate carboxylase promoter and the ubiquitin and UBQ3 promoters. Selectable markers such as hygromycin, phosphomannose isomerase and neomycin phosphotransferase are often used to facilitate selection and maintenance of transformed cells. Transformed plant cells can be maintained in culture as cells, aggregates (callus tissue) or regenerated into whole plants. Transgenic plant cells also can include algae engineered to produce CSR isoforms (see for example, Mayfield et al. (2003) PNAS 100:438-442). Because plants have different glycosylation patterns than mammalian cells, this can influence the choice of CSR isoforms produced in these hosts.

[0413] 5. Methods of Transfection and Transformation

[0414] Transformation or transfection of host cells is accomplished using standard techniques suitable to the chosen host cells. Methods of transfection are known to one of skill in the art, for example, calcium phosphate and electroporation, as well as the use of commercially available cationic lipid reagents, such as Lipofectamine™ Lipofectamine™ 2000, or Lipofectin® (Invitrogen, Carlsbad Calif.), which facilitate transfection. Depending on the host cell used, transformation is performed using standard techniques appropriate to such cells. Calcium treatment, employing calcium chloride for example, or electroporation is generally used for prokaryotes or other cells that contain substantial cell-wall barriers. Infection with Agrobacterium tumefaciens is used for transformation of certain plant cells. For mammalian cells without such cell walls, calcium phosphate precipitation can be employed. General aspects of transformation are described for plant cells (see e.g., Shaw et al., (1983) Gene, 23:315, WO89/05859), mammalian cells (see e.g., U.S. Pat. No. 4,399,216, Keown et al., Methods in Enzymolog., (1990) 185:527; Mansour et al., (1988) Nature 336:348), or yeast cells (see e.g. Val Solingen et al., (1977) J Bact (1977) 130:946, Hsiao et al., (1979) Proc. Natl. Acad. Sci., 76:3829). Other methods for introducing DNA into a host cell include, but are not limited to, nuclear microinjection, electroporation, bacterial protoplast fusion with intact cells, or using polycations such as polybrene or polyornithine.

[0415] 6. Production and Purification

[0416] The cells containing the expression vectors are cultured under conditions appropriate for production of the fusion polypeptide, and the fusion polypeptide or the cleaved mature recombinant protein (that is, the expressed protein with or without the precursor peptide sequence) is then recovered and purified. In general the protein that will be recovered is the isoform fusion polypeptide (for example containing fusion with an epitope tag or other fusion sequence) or the isoform (after cleavage of the precursor peptide), or both. It will be apparent that when the fusion polypeptide is secreted and the precursor peptide is cleaved during the process, the protein that will be recovered will be the isoform protein, or a modified form thereof. In some cases, the fusion polypeptide will be designed such that there can be additional amino acids present between the precursor peptide sequence and the isoform protein, such as for example, a restriction enzyme linker site. In these instances, cleavage of the precursor peptide from the fusion polypeptide can produce a modified isoform polypeptide having additional amino acids at the N-terminus. Non-limiting examples of additional amino acids that can be incorporated at the N-terminus of a secreted polypeptide due to the presence of a restriction enzyme linker sequence include, for example, SR or LE. Alternatively, the fusion polypeptide may be designed such that the precursor peptide is not completely processed such that incomplete cleavage of the precursor polypeptide results. For example, for a tPA precursor sequence, incomplete cleavage can occur at the furin cleavage site or the plasmin-like cleavage site. Where incomplete cleavage occurs at the plasmin-like cleavage site a modified isoform may be produced which has an altered N-terminus including, for example, addition of amino acids GAR. In some examples, a purified isoform can be treated with a plasmin-like protease resulting in a polypeptide that does not retain a GAR sequence at its N-terminus.

[0417] Modified CSR and ligand isoforms can include one or more additional amino acids at the N-terminus. These additional amino acids can include, but are not limited to, GAR, SR, LE or combinations thereof such as GARSR (SEQ ID NO:563) or GARLE (SEQ ID NO:564). Additionally, the secreted polypeptide also can include an amino acid sequence of a tag in addition to other sequences at the N-terminus of a secreted isoform polypeptide.

[0418] An isoform fusion polypeptide can be isolated using various techniques well-known in the art. One skilled in the art can readily follow known methods for isolating polypeptides and proteins in order to obtain one of the isolated polypeptides or proteins provided herein. These include, but are not limited to, immunochromatography, HPLC, size-exclusion chromatography, and ion-exchange chromatography. Examples of ion-exchange chromatography include anion and cation exchange and include the use of DEAE Sepharose, DEAE Sephadex, CM Sepharose, SP Sepharose, or any other similar column known to one of skill in the art. Isolation of an isoform fusion polypeptide from the cell culture media or from a lysed cell can be facilitated using antibodies directed against either an epitope tag in an isoform fusion polypeptide or against the isoform polypeptide and then isolated via immunoprecipitation methods and separation via SDS-polyacrylamide gel electrophoresis (PAGE). Alternatively, an isoform fusion can be isolated via binding of a polypeptide-specific antibody to an isoform fusion polypeptide and subsequent binding of the antibody to protein-A or protein-G sepharose columns, and elution of the protein from the column. The purification of an isoform fusion protein also can include an affinity column or bead immobilized with agents which will bind to the protein, followed by one or more column steps for elution of the protein from the binding agent. Examples of affinity agents include concanavalin A-agarose, heparin-toyopearl, or Cibacrom blue 3Ga Sepharose. A protein can also be purified by hydrophobic interaction chromatography using such resins as phenyl ether, butyl ether, or propyl ether.

[0419] In some examples, an isoform fusion protein can be purified using immunoaffinity chromatography. In such examples, an isoform fusion can be expressed as a fusion protein with an epitope tag such as described herein including, but not limited to, maltose binding protein (MBP), glutathione-S-transferase (GST) or thioredoxin (TRX), or a His tag. Kits for expression and purification of such fusion proteins are commercially available from New England BioLab (Beverly, Mass.), Pharmacia (Piscataway, N.J.), Invitrogen, and others. The protein also can be fused to a tag and subsequently purified by using a specific antibody directed to such an epitope. In some examples, an affinity column or bead immobilized with an epitope tag-binding agent can be used to purify an isoform fusion. For example, binding agents can include glutathione for interaction with a GST epitope tag, immobilized metal-affinity agents such as Cu2+ or Ni2+ for interaction with a Poly-His tag, anti-epitope antibodies such as an anti-myc antibody, and/or any other agent that can be immobilized to a column or bead for purification of an isoform fusion protein.

[0420] Finally, one or more reverse-phase high performance liquid chromatography (RP-HPLC) steps employing hydrophobic RP-HPLC media, e.g., silica gel having pendant methyl or other aliphatic groups, can be employed to further purify the protein. Some or all of the foregoing purification steps, in various combinations, also can be employed to provide a substantially homogeneous isolated recombinant protein.

[0421] Prior to purification, conditioned media containing the secreted CSR or ligand isoform polypeptide, including intron fusion proteins, can be concentrated, such as for example, using tangential flow membranes or using stirred cell system filters. Various molecular weight (MW) separation cut offs can be used for the concentration process. For example, a 10,000 MW separation cutoff can be used.

[0422] 7. Synthetic Isoforms

[0423] A variety of synthetic forms of the isoforms are provided. Included among them are conjugates in which the isoform or intron-encoded portion thereof is linked directly or via a linker to another agent, such as a targeting agent or to a molecule that provides the intron-encoded portion or isoform portion to a CSR or ligand isoform so that an activity of the isoform is modulated. Other synthetic forms include chimeras in which the extracellular domain portion and C-terminal portion, such as an intron-encoded portion, are from different isoforms. Also provided are “peptidomimetic” isoforms in which one or more bonds in the peptide backbone is (are) replaced by a bioisostere or other bond such that the resulting polypeptide peptidomimetic has improved properties, such as resistance to proteases, compared to the unmodified form.

[0424] Isoform Conjugates

[0425] CSR or ligand isoforms, including isoform fusions provided herein, also can be provided as conjugates between the isoform and another agent. The conjugate can be used to target to a receptor with which the isoform interacts and/or to another targeted receptor for delivery of an isoform. Such conjugates include linkage of a CSR or ligand isoform or isoform fusion to a targeted agent and/or targeting agent. Conjugates can be produced by any suitable method including chemical conjugation or chemical coupling, typically through disulfide bonds between cysteine residues present in or added to the components, or through amide bonds or other suitable bonds. Ionic or other linkages also are contemplated. Conjugates of isoforms with a targeted agent or agents also can be generated within an isoform fusion by operatively linking DNA encoding a targeted agent or targeting agent, with or without a linker region, to DNA encoding a CSR or ligand isoform or isoform fusion, such as a tPA-intron fusion protein fusion.

[0426] Pharmaceutical compositions can be prepared from CSR and ligand isoforms or isoform fusion conjugates and treatment effected by administering a therapeutically effective amount of a conjugate, for example, in a physiologically acceptable excipient. Isoform conjugates also can be used in in vivo therapy methods such as by delivering a vector containing a nucleic acid encoding a CSR or ligand isoform conjugate as a fusion protein.

[0427] Isoform conjugates can include one or more CSR or ligand isoforms linked, either directly or via a linker, to one or more targeted agents: (CSR isoform)n, (L)q, and (targeted agent)m in which at least one isoform is linked directly or via one or more linkers (L) to at least one targeted agent. Such conjugates also can be produced with any portion of an isoform sufficient to bind a target, such as a target cell type for treatment. Any suitable association among the elements of the conjugate and any number of elements where n, and m are integers greater than 1 and q is zero or any integer greater then 1, is contemplated as long as the resulting conjugates interacts with a targeted receptor or targeted cell type.

[0428] Examples of a targeted agent include drugs and other cytotoxic molecules such as toxins that act at or via the cell surface and those that act intracellularly. Examples of such moieties, include radionuclides, radioactive atoms that decay to deliver, e.g., ionizing alpha particles or beta particles, or X-rays or gamma rays, that can be targeted when coupled to an isoform. Other examples include chemotherapeutics that can be targeted by coupling with an isoform. For example, geldanamycin targets proteosomes. An isoform-geldanamycin molecule can be directed to intracellular proteosomes, degrading the targeted isoform and liberating geldanamycin at the proteosome. Other toxic molecules include toxins, such as ricin, saporin and natural products from conches or other members of phylum mollusca. Another example of a conjugate with a targeted agent is a CSR or ligand isoform coupled, for example as a protein fusion, with an antibody or antibody fragment. For example, an isoform including an isoform fusion such as, for example, a tPA-intron fusion protein fusion, can be coupled to an Fc fragment of an antibody that binds to a specific cell surface marker to induce killer T cell activity in neutrophils, natural killer cells, and macrophages. A variety of toxins are well known to those of skill in the art.

[0429] Isoform conjugates also can contain one or more CSR or ligand isoforms linked, either directly or via a linker, to one or more targeting agents: (CSR isoform)n, (L)q, and (targeting agent)m in which at least one isoform is linked directly or via one or more linkers (L) to at least one targeting agent. Any suitable association among the elements of the conjugate and any number of elements where n, and m are integer greater than 1 and q is zero or any integer greater then 1, is contemplated as long as the resulting conjugates interacts with a target, such as a targeted cell type.

[0430] Targeting agents include any molecule that targets a CSR or ligand isoform to a target such as a particular tissue or cell type or organ. Examples of targeting agents include cell surface antigens, cell surface receptors, proteins, lipids and carbohydrate moieties on the cell surface or within the cell membrane, molecules processed on the cell surface, secreted and other extracellular molecules. Molecules useful as targeting agents include, but are not limited to, an organic compound; inorganic compound; metal complex; receptor; enzyme; antibody; protein; nucleic acid; peptide nucleic acid; DNA; RNA; polynucleotide; oligonucleotide; oligosaccharide; lipid; lipoprotein; amino acid; peptide; polypeptide; peptidomimetic; carbohydrate; cofactor; drug; prodrug; lectin; sugar; glycoprotein; biomolecule; macromolecule; biopolymer; polymer; and other such biological materials. Exemplary molecules useful as targeting agents include ligands for receptors, such as proteinaceous and small molecule ligands, and antibodies and binding proteins, such as antigen-binding proteins.

[0431] Alternatively, a CSR or ligand isoform, which specifically interacts with a particular receptor (or receptors) is the targeting agent and it is linked to a targeted agent, such as a toxin, drug or nucleic acid molecule. The nucleic acid molecule can be transcribed and/or translated in the targeted cell or it can be regulatory nucleic acid molecule.

[0432] The CSR or ligand isoform and be linked directly to the targeted (or targeting agent) or can be linked indirectly via a linker. Linkers include peptide and non-peptide linkers and can be selected for functionality, such as to relieve or decrease steric hindrance caused by proximity of a targeted agent or targeting agent to an isoform and/or increase or alter other properties of the conjugate, such as the specificity, toxicity, solubility, serum stability and/or intracellular availability and/or to increase the flexibility of the linkage between a CSR isoform and a targeted agent or targeting agent. Examples of linkers and conjugation methods are known in the art (see, for example, WO 00/04926). Isoforms provided herein also can be targeted using liposomes and other such moieties that direct delivery of encapsulated or entrapped molecules.

[0433] 8. Formation of Multimers

[0434] Also provided herein are multimers of the isoforms, including the isoforms with linked preprosequences or portions thereof . Isoform multimers can be covalently-linked, non-covalently-linked, or chemically linked multimers to form dimers, trimers, or higher ordered multimers of the isoforms. The polypeptide components of the multimer can be the same or different. Typically, the components of an isoform multimer provided herein is one or more of the isoform fusions set forth in any of SEQ ID NOS: 31-47 encoding a polypeptide set forth in any of SEQ ID NOS: 32-48. In some examples, a multimer also can be formed between a modified CSR or ligand isoforms, such as for example, any that contain one or more additional amino acids at the N-terminus. These additional amino acids can include, but are not limited to, GAR, SR, LE or combinations thereof such as GARSR (SEQ ID NO:563) or GARLE (SEQ ID NO:564). Exemplary of polypeptide and encoding nucleic acid sequences of CSR or ligand isoforms, including modified forms thereof, that can be used in the multimers are any set forth in any of SEQ ID NOS: 139-354, and variants thereof.

[0435] Multimers of isoform polypeptides can be formeded formed by dimerization, such as the interactions between Fc domains, or they can be covalently joined. Multimerization between two isoform polypeptides can be spontaneous, or can occur due to forced linkage of two or more polypeptides. In one example, multimers can be linked by disulfide bonds formed between cysteine residues on isoforms polypeptides. In an additional example, multimers can be formed between two polypeptides through chemical linkage, such as for example, by using heterobifunctional linkers.

[0436] a. Peptide Linkers

[0437] Peptide linkers can be used to produce polypeptide multimers. In one example, peptide linkers can be fused to the C-terminal end of a first polypeptide and the N-terminal end of a second polypeptide. This structure can be repeated multiples times such that at least one, preferably 2, 3, 4, or more soluble polypeptides are linked to one another via peptide linkers at their respective termini. For example, a multimer polypeptide can have a sequence Z₁-X-Z₂, where Z₁ and Z₂ are each a sequence of all or part of a cell surface polypeptide isoform and where X is a sequence of a peptide linker. In some instances, Z₁ and/or Z₂ is a all or part of an isoform polypeptide. In another example, Z₁ and Z₂ are the same or they are different. In another example, the polypeptide has a sequence of Z₁-X-Z₂(-X-Z)ₙ, where “n” is any integer, i.e. generally 1 or 2. Typically, the peptide linker is of sufficient length to so that the resulting polypeptide is a soluble Examples of peptide linkers include glycine serine polypeptides, such s -Gly-Gly-, GGGGG (SEQ ID NO:582), GGGGS (SEQ ID NO:580) or (GGGGS)n, SSSSG (SEQ ID NO:581) or (SSSSG)n

[0438] Linking moieties are described, for example, in Huston et al. (1988) PNAS 85:5879-5883, Whitlow et al. (1993) Protein Engineering 6:989-995, and Newton et al., (1996) Biochemistry 35:545-553. Other suitable peptide linkers include any of those described in U.S. Patent Nos. 4,751,180 or 4,935,233, which are hereby incorporated by reference. A polynucleotide encoding a desired peptide linker can be inserted anywhere in an isoform or at the N- or C-terminus or between the preprosequence, in frame, using any suitable conventional technique.

[0439] b. Polypeptide Multimerization Domains

[0440] Interaction of two or more polypeptides can be facilitated by their linkage, either directly or indirectly, to any moiety or other polypeptide that are themselves able to interact to form a stable structure. For example, separate encoded polypeptide chains can be joined by multimerization, whereby multimerization of the polypeptides is mediated by a multimerization domain. Typically, the multimerization domain provides for the formation of a stable protein-protein interaction between a first chimeric polypeptide and a second chimeric polypeptide. Chimeric polypeptides include, for example, linkage (directly or indirectly) of a nucleic acid encoding an isoform polypeptide with a nucleic acid encoding a multimerization domain. Homo- or heteromultimeric polypeptides can be generated from co-expression of separate chimeric polypeptides. The first and second chimeric polypeptides can be the same or different.

[0441] Generally, a multimerization domain includes any capable of forming a stable protein-protein interaction. The multimerization domains can interact via an immunoglobulin sequence, leucine zipper, a hydrophobic region, a hydrophilic region, or a free thiol which forms an intermolecular disulfide bond between the chimeric molecules of a homo- or heteromultimer. In addition, a multimerization domain can include an amino acid sequence comprising a protuberance complementary to an amino acid sequence comprising a hole, such as is described, for example, in U.S. patent application Ser. No. 08/399,106. Such a multimerization region can be engineered such that steric interactions not only promote stable interaction, but further promote the formation of heterodimers over homodimers from a mixture of chimeric monomers. Generally, protuberances are constructed by replacing small amino acid side chains from the interface of the first polypeptide with larger side chains (e.g., tyrosine or typtophan). Compensatory cavities of identical or similar size to the protuberances are optionally created on the interface of the second polypeptide by replacing large amino acid side chains with smaller ones (e.g., alanine or threonine).

[0442] A chimeric isoform polypeptide, such as for example any isoform polypeptide provided herein, can be joined anywhere, but typically via its N- or C-terminus, to the N- or C-terminus of a multimerization domain to ultimately, upon expression, form a chimeric polypeptide

[0443] The resulting chimeric polypeptides, and multimers formed therefrom, can be purified by any suitable method, such as, for example, by affinity chromatography over Protein A or Protein G columns. Where two nucleic acid molecules encoding different chimeric polypeptides are transformed into cells, formation of homo- and heterodimers will occur. Conditions for expression can be adjusted so that heterodimer formation is favored over homodimer formation.

[0444] i. Immunoglobulin Domain

[0445] Multimerization domains include those comprising a free thiol moiety capable of reacting to form an intermolecular disulfide bond with a multimerization domain of an additional amino acid sequence. For example, a multimerization domain can include a portion of an immunoglobulin molecule, such as from IgG1, IgG2, IgG3, IgG4, IgA, IgD, IgM, and IgE. Generally, such a portion is an immunoglobulin constant region (Fc). Preparations of fusion proteins containing soluble CSR extracellular domain polypeptides fused to various portions of antibody-derived polypeptides (including the Fc domain) has been described, see e.g., Ashkenazi et al. (1991) PNAS 88: 10535; Byrn et al. (1990) Nature, 344:677; and Hollenbaugh and Aruffo, (1992) “Construction of Immnoglobulin Fusion Proteins,” in Current Protocols in Immunology, Suppl. 4, pp. 10.19.1-10.19.11.

[0446] Antibodies bind to specific antigens and contain two identical heavy chains and two identical light chains covalently linked by disulfide bonds. The heavy and light chains contain variable regions, which bind the antigen, and constant (C) regions. In each chain, one domain (V) has a variable amino acid sequence depending on the antibody specificity of the molecule. The other domain (C) has a rather constant sequence common among molecules of the same class. The domains are numbered in sequence from the amino-terminal end. For example, the IgG light chain is composed of two immunoglobulin domains linked from N- to C-terminus in the order V_{L}-C_{L}, referring to the light chain variable domain and the light chain constant domain, respectively. The IgG heavy chain is composed of four immunoglobulin domains linked from the N- to C-terminus in the order V_{H}-C_{H}1-CH2-CH3, referring to the variable heavy domain, contain heavy domain 1, constant heavy domain 2, and constant heavy domain 3. The resulting antibody molecule is a four chain molecule where each heavy chain is linked to a light chain by a disulfide bond, and the two heavy chains are linked to each other by disulfide bonds. Linkage of the heavy chains is mediated by a flexible region of the heavy chain, known as the hinge region. Fragments of antibody molecules can be generated, such as for example, by enzymatic cleavage. For example, upon protease cleavage by papain, a dimer of the heavy chain constant regions, the Fc domain, is cleaved from the two Fab regions (i.e. the portions containing the variable regions).

[0447] In humans, there are five antibody isotypes classified based on their heavy chains denoted as delta (δ), gamma (γ), mu (μ), and alpha (α) and epsilon (ε), giving rise to the IgD, IgG, IgM, IgA, and IgE classes of antibodies, respectively. The IgA and IgG classes contain the subclasses IgA1, IgA2, IgG1, IgG2, IgG3, and IgG4. Sequence differences between immunoglobulin heavy chains cause the various isotypes to differ in, for example, the number of C domains, the presence of a hinge region, and the number and location of interchain disulfide bonds. For example, IgM and IgE heavy chains contain an extra C domain (C4), that replaces the hinge region. The Fc regions of IgG, IgD, and IgA pair with each other through their Cγ3, Cδ3, and Cα3 domains, whereas the Fc regions of IgM and IgE dimerize through their Cμ4 and Cε4 domains. IgM and IgA form multimeric structures with ten and four antigen-binding sites, respectively.

[0448] Immunoglobulin chimeric polypeptides provided herein include a full-length immunoglobulin polypeptide. Alternatively, the immunoglobulin polypeptide is less than full length, i.e. containing a heavy chain, light chain, Fab, Fab2, Fv, or Fc. In one example, the immunoglobulin chimeric polypeptides are assembled as monomers or hetero-or homo-multimers, and particularly as dimer or tetramers. Chains or basic units of varying structures can be utilized to assemble the monomers and hetero- and homo-multimers. For example, an isoform polypeptide can be fused to all or part of an immunoglobulin molecule, including all or part of C_{H}, C_{L}, V_{H}, or V_{L} domain of an immunoglobulin molecule (see. e.g., U.S. Pat. application No. 5,116,964). Chimeric isoform polypeptides can be readily produced and secreted by mammalian cells transformed with the appropriate nucleic acid molecule. The secreted forms include those where the isoform polypeptide is present in heavy chain dimers; light chain monomers or dimers; and heavy and light chain heterotetramers where the isoform polypeptide is fused to one or more light or heavy chains, including heterotetramers where up to and including all four variable regions analogues are substituted. In some examples, one or more than one nucleic acid fusion molecule can be transformed into host cells to produce a multimer where the isoforms portions of the multimer are the same or different. In some examples, a non-isoform polypeptide light-heavy chain variable-like domain is present, thereby producing a heterobifunctional antibody. In some examples, a chimeric polypeptide can be made fused to part of an immunoglobulin molecule lacking hinge disulfides, in which non-covalent or covalent interactions of the two polypeptides associate the molecule into a homo- or heterodimer.

[0449] (a) Fc Domain

[0450] Typically, the immunoglobulin portion of an includes the heavy chain of an immunoglobulin polypeptide, most usually the constant domains of the heavy chain. Exemplary sequences of heavy chain constant regions for human IgG sub-types are known. For example, for the exemplary heavy chain constant region set forth in SEQ ID NO:565, the CH1 domain corresponds to amino acids 1-98, the hinge region corresponds to amino acids 99-110, the CH2 domain corresponds to amino acids 111-223, and the CH3 domain corresponds to amino acids 224-330.

[0451] In one example, an immunoglobulin polypeptide chimeric protein can include the Fc region of an immunoglobulin polypeptide. Typically, such a fusion retains at least a functionally active hinge, C_{H}2 and C_{H}3 domains of the constant region of an immunoglobulin heavy chain. For example, a full-length Fc sequence of IgG1 includes amino acids 99-330 of the sequence set forth in SEQ ID NO:565. Numerous Fc domains are known, including variant Fc domains whose T-cell activity is reduced or eliminated. The precise site at which the linkage is made is not critical: particular sites are well known and can be selected in order to optimize the biological activity, secretion, or binding characteristics of the isoforn polypeptide. Exemplary sequence of Fc domains are set forth in SEQ ID NO: 566 and 567.

[0452] In addition to hIgG1 Fc, other Fc regions also can be included in the isoform polypeptides provided herein. For example, where effector functions mediated by Fc/FcγR interactions are to be minimized, fusion with IgG isotypes that poorly recruit complement or effector cells, such as for example, the Fc of IgG2 or IgG4, is contemplated. Additionally, the Fc fusions can contain immunoglobulin sequences that are substantially encoded by immunoglobulin genes belonging to any of the antibody classes, including, but not limited to IgG (including human subclasses IgG1, IgG2, IgG3, or IgG4), IgA (including human subclasses IgA1 and IgA2), IgD, IgE, and IgM classes of antibodies. Further, linkers can be used to covalently link Fc to another polypeptide to generate an Fc chimera.

[0453] Modified Fc domains also are known (see e.g. U.S. Patent Publication No. US 2006/0024298; and International Patent Publication No. WO 2005/063816 for exemplary modifications). In some examples, the Fc region is such that it has altered (i.e. more or less) effector function than the effector function of an Fc region of a wild-type immunoglobulin heavy chain. The Fc regions of an antibody interacts with a number of Fc receptors, and ligands, imparting an array of important functional capabilities referred to as effector functions. Fc effector functions include, for example, Fc receptor binding, complement fixation, and T cell depleting activity (see e.g., U.S. Pat. No. 6,136,310). Methods of assaying T cell depleting activity, Fc effector function, and antibody stability are known in the art. For example, the Fc region of an IgG molecule interacts with the FcγRs. These receptors are expressed in a variety of immune cells, including for example, monocytes, macrophages, neutrophils, dendritic cells, eosinophils, mast cells, platelets, B cells, large granular lymphocytes, Langerhans' cells, natural killer (NK) cells, and γδT cells. Formation of the Fc/FcγR complex recruits these effector cells to sites of bound antigen, typically resulting in signaling events within the cells and important subsequent immune responses such as release of inflammation mediators, B cell activation, endocytosis, phagocytosis, and cytotoxic attack. The ability to mediate cytotoxic and phagocytic effector functions is a potential mechanism by which antibodies destroy targeted cells. Recognition of and lysis of bound antibody on target cells by cytotoxic cells that express FcγRs is referred to as antibody dependent cell-mediated cytotoxicity (ADCC). Other Fc receptors for various antibody isotypes include FcFRs (IgE), FcαRs (IgA), and FcμRs (IgM).

[0454] Thus, a modified Fc domain can have altered affinity, including but not limited to, increased or low or no affinity for the Fc receptor. For example, the different IgG subclasses have different affinities for the FcγRs, with IgG1 and IgG3 typically binding substantially better to the receptors than IgG2 and IgG4. In addition, different FcγRs mediate different effector functions. FcγR1, FcγRIIa/c, and FcγRIIIa are positive regulators of immune complex triggered activation, characterized by having an intracellular domain that has an immunoreceptor tyrosine-based activation motif (ITAM). FcγRIIb, however, has an immunoreceptor tyrosine-based inhibition motif (ITIM) and is therefore inhibitory. Thus, altering the affinity of an Fc region for a receptor can modulate the effector functions induced by the Fc domain.

[0455] In one example, an Fc region is used that is modified for optimized binding to certain FcγRs to better mediate effector functions, such as for example, ADCC. Such modified Fc regions can contain modifications corresponding to any one or more of G20S, G20A, S23D, S23E, S23N, S23Q, S23T, K30H, K30Y, D33Y, R39Y, E42Y, T44H, V48I, S51E, H52D, E56Y, E56I, E56H, K58E, G65D, E67L, E67H, S82A, S82D, S88T, S108G, S108I, K110T, K110E, K110D, A111D, A114Y, A114L, A114I, I116D, I116E, I116N, I116Q, E117Y, E117A, K118T, K118F, K118A, and P180L of the exemplary Fc sequence set forth in SEQ ID NO:566, or combinations thereof. A modified Fc containing these mutations can have enhanced binding to an FcR such as, for example, the activating receptor FcγIIIa and/or can have reduced binding to the inhibitory receptor FcγRIIb (see e.g., US 2006/0024298). Fc regions modified to have increased binding to FcRs can be more effective in facilitating the destruction of cancer cells in patients, even when linked with an isoform polypeptide. There are a number of possible mechanisms by which antibodies destroy tumor cells, including anti-proliferation via blockage of need growth pathways, intracellular signaling leading to apopotosis, enhanced down-regulation and/or turnover of receptors, ADCC, and via promotion of the adaptive immune response.

[0456] In another example, a variety of Fc mutants with substitutions to reduce or ablate binding with FcγRs also are known. Such muteins are useful in instances where there is a need for reduced or eliminated effector function mediated by Fc. This is often the case where antagonism, but not killing of the cells bearing a target antigen is desired. Exemplary of such an Fc is an Fc mutein described in U.S. Pat. No. 5,457,035. An exemplary Fc mutein is set forth in SEQ ID NO: 568.

[0457] In an additional example, an Fc region can be utilized that is modified in its binding to FcRn, thereby improving the pharmacokinetics of an −Fc chimeric polypeptide. FcRn is the neonatal FcR, the binding of which recycles endocytosed antibody from the endosomes back to the bloodstream. This process, coupled with preclusion of kidney filtration due to the large size of the full length molecule, results in favorable antibody serum half-lives ranging from one to three weeks. Binding of Fc to FcRn also plays a role in antibody transport.

[0458] Typically, a polypeptide multimer is a dimer of two chimeric proteins created by linking, directly or indirectly, two of the same or different isoform polypeptide to an Fc polypeptide. In some examples, a gene fusion encoding the isoform-Fc (with the pre-prosequence as described herein) chimeric protein is inserted into an appropriate expression vector. The resulting Fc chimeric proteins can be expressed in host cells transformed with the recombinant expression vector, and allowed to assemble much like antibody molecules, where interchain disulfide bonds form between the Fc moieties to yield divalent polypeptides. Typically, a host cell and expression system is a mammalian expression system to allow for glycosylation for stabilizing the Fc proteins. Other host cells also can be used where glycosylation at this position is not a consideration.

[0459] The resulting chimeric polypeptides containing Fc moieties, and multimers formed therefrom, can be easily purified by affinity chromatography over Protein A or Protein G columns. Where two nucleic acids molecules encoding different chimeric polypeptides are transformed into cells, the formation of heterodimers must be biochemically achieved since chimeric molecules carrying the Fc-domain will be expressed as disulfide-linked homodimers as well. Thus, homodimers can be reduced under conditions that favor the disruption of inter-chain disulfides, but do no effect intra-chain disulfides. Typically, chimeric monomers with different extracellular portions are mixed in equimolar amounts and oxidized to form a mixture of homo- and heterodimers. The components of this mixture are separated by chromatographic techniques. Alternatively, the formation of this type of heterodimer can be biased by genetically engineering and expressing fusion molecules that contain a isoform polypeptide, followed by the Fc-domain of hIgG, followed by either c-jun or the c-fos leucine zippers (see below). Since the leucine zippers form predominantly heterodimers, they can be used to drive the formation of the heterodimers when desired. Chimeric polypeptides containing Fc regions also can be engineered to include a tag with metal chelates or other epitope. The tagged domain can be used for rapid purification by metal-chelate chromatography, and/or by antibodies, to allow for detection of western blots, immunoprecipitation, or activity depletion/blocking in bioassays.

[0460] (b) Protuberances-Into-Cavity (ie. Knobs and Holes)

[0461] Multimers can be engineered to contain an interface between a first chimeric polypeptide and a second chimeric polypeptide to facilitate hetero-oligomerization over homo-oligomerization. Typically, a multimerization domain of one or both of the first and second chimeric polypeptide is a modified antibody fragment such that the interface of the antibody molecule is modified to facilitate and/or promote heterodimerization. In some cases, the antibody molecule is a modified Fc region. Thus, modifications include introduction of a protuberance into a first Fc polypeptide and a cavity into a second Fc polypeptide such that the protuberance is positionable in the cavity to promote complexing of the first and second Fc-containing chimeric polypeptides.

[0462] Typically, stable interaction of a first chimeric polypeptide and a second chimeric polypeptide is via interface interactions of the same or different multimerization domain that contains a sufficient portion of a CH3 domain of an immunoglobulin constant domain. Various structural and functional data suggest that antibody heavy chain association is directed by the CH3 domain. For example, X-ray crystallography has demonstrated that the intermolecular association between human IgG1 heavy chains in the Fc region includes extensive protein/protein interaction between CH3 domain whereas the glycosylated CH2 domains interact via their carbohydrate (Deisenhofer et al. (1981) Biochem. 20: 2361). In addition, there are two inter-heavy chain disulfide bonds which are efficiently formed during antibody expression in mammalian cells unless the heavy chain is truncated to remove the CH2 and CH3 domains (King et al. (1992) Biochem. J. 281:317). Thus, heavy chain assembly appears to promote disulfide bond formation rather than vice versa. Engineering of the interface of the CH3 domain promotes formation of heteromultimers of different heavy chains and hinders the assembly of corresponding homomultimers (see e.g., U.S. Pat. No. 5,731,168; International Patent Application WO 98/50431 and WO 2005/063816; Ridgway et al. (1996) Protein Engineering, 9:617-621).

[0463] Thus, multimers provided herein can be formed between an interface of a first and second chimeric isoform polypeptide (the first and second polypeptides can be the same or different) where the multimerization domain of the first polypeptide contains at least a sufficient portion of a CH3 interface of an Fc domain that has been modified to contain a protuberance and the multimerization domain of the second polypeptide contains at least a sufficient portion of a CH3 interface of an Fc domain that has been modified to contain a cavity. All or a sufficient portion of a modified CH3 interface can be from an IgG, IgA, IgD, IgE, or IgM immunoglobulin. Interface residues targeted for modification in the CH3 domain of various immunoglobulin molecules are set forth in U.S. Pat. No. 5,731,168. Generally, the multimerization domain is all or a sufficient portion of a CH3 domain derived from an IgG antibody, such as for example, IgG1.

[0464] Amino acids targeted for replacement and/or modification to create protuberances or cavities in a polypeptide are typically interface amino acids that interact or contact with one or more amino acids in the interface of a second polypeptide. A first polypeptide that is modified to contain protuberance amino acids include replacement of a native or original amino acid with an amino acid that has at least one side chain which projects from the interface of the first polypeptide and is therefore positionable in a compensatory cavity in an adjacent interface of a second polypeptide. Most often, the replacement amino acid is one which has a larger side chain volume than the original amino acid residue. One of skill in the art can determine and/or assess the properties of amino acid residues to identify those that are ideal replacement amino acids to create a protuberance. Generally, the replacement residues for the formation of a protuberance are naturally occurring amino acid residues and include, for example, arginine (R), phenylalanine (F), tyrosine (Y), or tyrptophan (W). In some examples, the original residue identified for replacement is an amino acid residue that has a small side chain such as, for example, alanine, asparagines, aspartic acid, glycine, serine, threonine, or valine.

[0465] A second polypeptide that is modified to contain a cavity is one that includes replacement of a native or original amino acid with an amino acid that has at least one side chain that is recessed from the interface of the second polypeptide and thus is able to accommodate a corresponding protuberance from the interface of a first polypeptide. Often, the replacement amino acid is one which has a smaller side chain volume than the original amino acid residue. One of skill in the art can determine and/or assess the properties of amino acid residues to identify those that are ideal replacement residues for the formation of a cavity. Generally, the replacement residues for the formation of a cavity are naturally occurring amino acids and include, for example, alanine (A), serine (S), threonine (T) and valine (V). In some examples, the original amino acid identified for replacement is an amino acid that has a large side chain such as, for example, tyrosine, arginine, phenylalanine, or typtophan.

[0466] The CH3 interface of human IgG1, for example, involves sixteen residues on each domain located on four anti-parallel β-strands which buries 1090 Å2 from each surface (see e.g., Deisenhofer et al. (1981) Biochemistry, 20:2361-2370; Miller et al., (1990) J Mol. Biol., 216, 965-973; Ridgway et al., (1996) Prot. Engin., 9: 617-621; U.S. Pat. 5,731,168). Modifications of a CH3 domain to create protuberances or cavities are described, for example, in U.S. Pat. No. 5,731,168; International Patent Applications WO98/50431 and WO 2005/063816; and Ridgway et al., (1996) Prot. Engin., 9: 617-621. For example, modifications in a CH3 domain to create protuberances or cavities can be replacement of any amino acid corresponding to the interface amino acid Q230, V231, Y232, T233, L234, V246, S247, L248, T249, C250, L251, V252, K253, G254, F255, Y256, K275, T276, T277, P278, V279, L280, D281, G285, S286, F287, F288, L289, Y290, S291, K292, L293, T294, and V295 of the sequence set forth in SEQ ID NO:565. In some examples, modifications of a CH3 domain to create protuberances or cavities are typically targeted to residues located on the two central anti-parallel β-strands. The aim is to minimize the risk that the protuberances which are created can be accommodated by protruding into the surrounding solvent rather than being accommodated by a compensatory cavity in the partner CH3 domain. Exemplary of such modifications include, for example, replacement of any amino acid corresponding to the interface amino acid T249, L251, P278, F288, Y290, and K292. Exemplary of amino acid pairs for modification in a CH3 domain interface to create protuberances/cavity interactions include modification of T249 and Y290; and F288 and T277. For example, modifications can include T249Y and Y290T; T249W and Y290A; F288A and T277W; F288W and T277S; and Y290T and T249Y.

[0467] In some example, more than one interface interaction can be made. For example, modifications also include, for example, two or more modifications in a first polypeptide to create a protuberance and two or more medications in a second polypeptide to create a cavity. Exemplary of such modifications include, for example, modification of T249Y and F288A in a first polypeptide and modification of T277W and Y290T in a second polypeptide; modification of T277W and F288W in a first polypeptide and modification of T277S and Y290A in a second polypeptide; or modification of F288A and Y290A in a first polypeptide and T249W and T277S in a second polypeptide.

[0468] As with other multimerization domains described herein, including all or part of any immunoglobulin molecule or variant thereof, such as an Fc domain or variant thereof, an Fc variant containing CH3 protuberance/cavity modifications can be joined to an isoform polypeptide anywhere, but typically via its N- or C-terminus, to the N- or C-terminus of a first and/or second isoform polypeptide to form a chimeric polypeptide. The linkage can be direct or indirect via a linker. Also, the chimeric polypeptide can be a fusion protein or can be formed by chemical linkage, such as through covalent or non-covalent interactions. Typically, a knob and hole molecule is generated by co-expression of a first isoform polypeptide linked to an Fc variant containing CH3 protuberance modification(s) with a second isoform polypeptide linked to an Fc variant containing CH3 cavitity modification(s).

[0469] ii. Leucine Zipper

[0470] Another method for preparing multimers involves use of a leucine zipper domain. Leucine zippers are peptides that promote multimerization of the proteins in which they are found. Typically, leucine zipper is a term used to refer to a repetitive heptad motif containing four to five leucine residues present as a conserved domain in several proteins. Leucine zippers fold as short, parallel coiled coils, and can be responsible for oligomerization of the proteins of which they form a domain. Leucine zippers were originally identified in several DNA-binding proteins (see e.g., Landschulz et al. (1988) Science 240:1759), and have since been found in a variety of proteins. Among the known leucine zippers are naturally occurring peptides and derivatives thereof that dimerize or trimerize. Recombinant chimeric proteins containing an isoform polypeptide linked, directly or indirectly, to a leucine zipper peptide can be expressed in suitable host cells, and the polypeptide multimer that forms can be recovered from the culture supernatant.

[0471] Leucine zipper domains fold as short, parallel coiled coils (O'Shea et al. (1991) Science, 254:539). The general architecture of the parallel coiled coil has been characterized, with a “knobs-into-holes” packing, first proposed by Crick in 1953 (Acta Crystallogr., 6:689). The dimer formed by a leucine zipper domain is stabilized by the heptad repeat, designated (abcdefg)n (see e.g., McLachlan and Stewart (1978) J. Mol. Biol. 98:293), in which residues a and d are generally hydrophobic residues, with d being a leucine, which lines up on the same face of a helix. Oppositely-charged residues commonly occur at positions g and e. Thus, in a parallel coiled coil formed from two helical leucine zipper domains, the “knobs” formed by the hydrophobic side chains of the first helix are packed into the “holes” formed between the side chains of the second helix.

[0472] The leucine residues at position d contribute large hydrophobic stabilization energies, and are important for dimer formation (Krystek et al. (1991) Int. J. Peptide Res. 38:229). Hydrophobic stabilization energy provides the main driving force for the formation of coiled coils from helical monomers. Electrostatic interactions also contribute to the stoichiometry and geometry of coiled coils.

[0473] (a) Fos and Jun

[0474] Two nuclear transforming proteins, fos and jun, exhibit leucine zipper domains, as does the gene product of the murine proto-oncogene, c-myc. The leucine zipper domain is necessary for biological activity (DNA binding ) in these proteins. The products of the nuclear oncogenes fos and jun contain leucine zipper domains that preferentially form a heterodimer (O'Shea et al. (1989) Science, 245:646; Turner and Tijian (1989) Science, 243:1689). For example, the leucine zipper domains of the human transcription factors c-jun and c-fos have been shown to form stable heterodimers with a 1:1 stoichiometry (see e.g., Busch and Sassone-Corsi (1990) Trends Genetics, 6:36-40; Gentz et al., (1989) Science, 243:1695-1699). Although jun-jun homodimers also have been shown to form, they are about 1000-fold less stable than jun-fos heterodimers.

[0475] Thus, typically an isoform polypeptide multimer provided herein is generated using a jun-fos combination. Generally, the leucine zipper domain of either c-jun or c-fos is fused in frame at the C-terminus of an isoform of a polypeptide by genetically engineering fusion genes. Exemplary sequences of a c-jun or c-fos leucine zipper domain is set forth in SEQ ID NOS: 569 and 570, respectively. In some instances, a sequence of a leucine zipper can be modified, such as by the addition of a cysteine residue to allow formation of disulfide bonds, or the addition of a tyrosine residue at the C-terminus to facilitate measurement of peptide concentration. Exemplary sequences of a modified c-jun or c-fos leucine zipper domain are set forth in SEQ ID NOS: 571 and 572, respectively. In addition, the linkage of an isoform polypeptide with a leucine zipper can be direct or can employ a flexible linker domain, such as for example a hinge region of IgG, or other polypeptide linkers of small amino acids such as glycine, serine, threonine, or alanine at various lengths and combinations. In some instances, separation of a leucine zipper from the C-terminus of an encoded polypeptide can be effected by fusion with a sequence encoding a protease cleavage sites, such as for example, a thrombin cleavage site. Additionally, the chimeric proteins can be tagged, such as for example, by a 6×His tag, to allow rapid purification by metal chelate chromatography and/or by epitopes to which antibodies are available, such as for example a myc tag, to allow for detection on western blots, immunoprecipitation, or activity depletion/blocking bioassays.

[0476] (b) GCN4

[0477] A leucine zipper domain also occurs in a nuclear protein that functions as a transcriptional activator of a family of genes involved in the General Control of Nitrogen (GCN4) metabolism in S. cerevisiae. An exemplary sequence of the GCN4 leucine zipper domain is set forth in SEQ ID NO: 573. The protein is able to dimerize and bind promoter sequences containing the recognition sequence for GCN4, thereby activating transcription in times of nitrogen deprivation. Amino acid substitutions in the a and d residues of a synthetic peptide representing the GCN4 leucine zipper domain, change the oligomerization properties of the leucine zipper domain. For example, when all residues at position a are changed to isoleucine, the leucine zipper still forms a parallel dimer. When, in addition to this change, all leucine residues at position d also are changed to isoleucine, the resultant peptide spontaneously forms a trimeric parallel coiled coil in solution. Exemplary sequences of trimer and tetramer forms of a GCN4 leucine zipper domain are set forth in SEQ ID NOS: 574 and 575, respectively.

[0478] iii. Other Multimerization Domains

[0479] Other multimerization domains are known to those of skill in the art and are any that facilitate the protein-protein interaction of two or more polypeptides that are separately generated and expressed. Examples of other multimerization domains that can be used to provide protein-protein interactions between or among polypeptides include, but are not limited to, the barnase-barstar module (see e.g., Deyev et al., (2003) Nat. Biotechnol. 21:1486-1492); selection of particular protein domains (see e.g., Terskikh et al., (1997) PNAS 94: 1663-1668 and Muller et al., (1998) FEBS Lett. 422:259-264); selection of particular peptide motifs (see e.g., de Kruif et al., (1996) J. Biol. Chem. 271:7630-7634 and Muller et al., (1998) FEBS Lett. 432: 45-49); and the use of disulfide bridges for enhanced stability (de Kruif et al., (1996) J. Biol. Chem. 271:7630-7634 and Schmiedl et al., (2000) Protein Eng. 13:725-734). Exemplary of another type of multimerization domain is one where multimerization is facilitated by protein-protein interactions between different subunit polypeptides, such as is described below for PKA/AKAP interaction.

[0480] R/PKA-AD/AKAP

[0481] Multimeric polypeptides also can be generated utilizing protein-protein interactions between the regulatory (R) subunit of cAMP-dependent protein kinase (PKA) (see e.g., SEQ ID NO: 576 or 578) and the anchoring domains (AD) of A kinase anchor proteins (AKAPs, see e.g., Rossi et al., (2006) PNAS 103:6841-6846) (see e.g., SEQ ID NO: 577 or SEQ ID NO: 579). Two types of R subunits (RI and RII) are found in PKA, each with an α and β isoforn. The R subunits exist as dimers, and for RII, the dimerization domain resides in the 44 amino-terminal residues. AKAPs, via the interaction of their AD domain, interact with the R subunit of PKA to regulate its activity. AKAPs bind only to dimeric R subunits. For example, for human RIIα, the AD binds to a hydrophobic surface formed from the 23 amino-terminal residues.

[0482] F. Assays to Assess Activity of an Isoform

[0483] CSR and ligand isoforms such as any provided herein that contain additional amino acids as compared to a cognate CSR or ligand isoform retain their function following the production and purification of the isoform. Such modified fusion isoforms include, but are not limited to, those isoforms having additional amino acids at the N-terminus due to incomplete processing following secretion (i.e. GAR), the presence of encoded linker sequences (i.e. LE or SR), and/or the presence of an epitope tag (i.e. c-myc or His-tag). Generally, isoforms exhibit alterations in structure or in one more activities compared to a full-length, wildtype or predominant form of a cognate receptor or ligand. In addition, isoforms can alter (modulate) the activity of a cognate receptor or ligand. All such isoforms are candidate therapeutics.

[0484] Where the isoforms exhibits a difference in an activity, in vitro and in vivo assays can be used to monitor or screen isoforms. In vitro and in vivo assays also can be used to screen isoforms to identify or select those that modulate the activity of a particular receptor or pathway. Such assays are well known to those of skill in the art. One of skill in the art can test a particular purified isoform for interaction with a receptor or ligand and/or can test to assess an activity or any change in activity compared to a cognate receptor or ligand. Some such assays are exemplified herein.

[0485] Exemplary in vitro and in vivo assays are provided herein for assessing an activity of a purified isoform produced from fusion of an isoform to a precursor sequence, such as a tPA pre/prosequence, and optionally an epitope tag. The assays provided herein also can be used as a comparison of an activity of an isoform to an activity of a wildtype or predominant form of a cognate receptor or ligand. Many of the assays are applicable to RTKs or RTK isoforms, but can be used to assess other CSRs and CSR isoforms as well as other ligand isoforms that modulate the activity of a CSR. In addition, numerous assays, such as assays for kinase activities and cell proliferation activities of CSRs are known to one of skill in the art. Assays for activities of RTK isoforms and RTKs include, but are not limited to, kinase assays, homodimerization and heterodimerization assays, protein:protein interaction assays, structural assays, cell signaling assays and in vivo phenotyping assays. Assays also include employing animal models, including disease models in which an activity can be observed and/or measured or otherwise assessed. Dose response curves of a CSR or ligand isoform in such assays, such as an isoform produced from an isoform fusion, can be used to assess modulation of biological activities as well as to determine therapeutically effective amounts of an isoform for in vivo administration. Exemplary assays are described below.

[0486] 1. Kinase Assays

[0487] Kinase activity can be detected and/or measured directly and indirectly. For example, antibodies against phosphotyrosine can be used to detect phosphorylation of an RTK, RTK isoform, an RTK:RTK isoform complex and phosphorylation of other proteins and signaling molecules. For example, activation of tyrosine kinase activity of an RTK can be measured in the presence of a ligand for an RTK. Transphosphorylation can be detected by anti-phosphotyrosine antibodies. Transphosphorylation can be measured and/or detected in the presence and absence of an RTK isoform, thus measuring the ability of an RTK isoform to modulate the transphosphorylation of an RTK. Briefly, cells expressing an RTK isoform or that have been exposed to an RTK isoform, are treated with ligand. Cells are lysed and protein extracts (whole cell extracts or fractionated extracts) are loaded onto a polyacrylamide gel, separated by electrophoresis and transferred to membrane, such as used for western blotting. Immunoprecipitation with anti-RTK antibodies also can be used to fractionate and isolate RTK proteins before performing gel electrophoresis and western blotting. The membranes can be probed with anti-phosphotyrosine antibodies to detect phosphorylation as well as probed with anti-RTK antibodies to detect total RTK protein. Control cells, such as cells not expressing RTK isoform and cells not exposed to ligand can be subjected to the same procedures for comparison.

[0488] Tyrosine phosphorylation also can be measured directly, such as by mass spectroscopy. For example, the effect of an RTK isoform on the phosphorylation state of an RTK can be measured, such as by treating intact cells with various concentrations of an RTK isoform and measuring the effect on activation of an RTK. The RTK can be isolated by immunoprecipitation and trypsinized to produce peptide fragments for analysis by mass spectroscopy. Peptide mass spectroscopy is a well-established method for quantitatively determining the extent of tyrosine phosphorylation for proteins; phosphorylation of tyrosine increases the mass of the peptide ion containing the phosphotyrosine, and this peptide is readily separated from the non-phosphorylated peptide by mass spectroscopy.

[0489] For example, tyrosine-1139 and tyrosine-1248 are known to be autophosphorylated in the HER2 RTK. Trypsinized peptides can be empirically determined or predicted based on polypeptide, for example by using the ExPASy-PeptideMass program. The extent of phosphorylation of tyrosine-1139 and tyrosine-1248 can be determined from the mass spectroscopy data of peptides containing these tyrosines. Such assays can be used to assess the extent of auto-phosphorylation of an RTK isoform and the ability of an RTK isoform to transphosphorylate an RTK.

[0490] 2. Complexation

[0491] Complexation, such as dimerization of RTKs and RTK isoforms and trimerization of TNFRs and TNFR isoforms, can be detected and/or measured. For example, isolated polypeptides can be mixed together and subjected to gel electrophoresis and western blotting. CSRs and/or CSR isoforms also can be added to cells and cell extracts, such as whole cell or fractionated extracts, and can be subjected to gel electrophoresis and western blotting. Antibodies recognizing the polypeptides can be used to detect the presence of monomers, dimers and other complexed forms. Alternatively, labeled CSRs and/or labeled CSR isoforms can be detected in the assays.

[0492] For example, such assays can be used to compare homodimerization of an RTK or heterodimerization of two or more RTKs in the presence and absence of an RTK isoform. Assays also can be performed to assess homodimerization of an RTK isoform and/or its ability to heterodimerize with an RTK. For example, an ErbB2 RTK isoform can be assessed for its ability to heterodimerize with HER2, HER3 and HER4. Additionally, a HER2 RTK isoform can be assessed for its ability to modulate the ability of HER2 to homodimerize with itself.

[0493] 3. Ligand Binding

[0494] Generally, CSRs bind to one or more ligands. Ligand binding modulates the activity of the receptor and thus modulates, for example, signaling within a signal transduction pathway. Ligand binding of a CSR isoform and ligand binding of a CSR in the presence of a CSR isoform can be measured. For example, labeled ligand such as radiolabeled ligand can be added to a purified or partially purified CSR in the presence or absence (control) of a CSR isoform. Immunoprecipitation and measurement of radioactivity can be used to quantify the amount of ligand bound to a CSR in the presence and absence of a CSR isoform. A CSR isoform also can be assessed for ligand binding such as by incubating a CSR isoform with labeled ligand and determining the amount of labeled ligand bound by a CSR isoform, for example, compared to an amount bound by a wildtype or predominant form of a corresponding CSR.

[0495] 4. Receptor Binding

[0496] CSR and ligand isoforms can be assessed directly by assessing binding of an isoform to cells. For ligand isoforms, binding can be compared to binding of a cognate ligand to cells. In some examples, competitive assays can be employed with an isoform and other known ligands or isoforms for binding to cells known to express a binding receptor. For example, the ability of HGF isoforms to compete with HGF for binding to the MET receptor can be assessed. HGF and HGF isoforms can be radioiodinated by the chloramine T method (see Nakamura et al., (1997), Cancer Res. 57, 3305-3313) and specific activities of ¹²⁵I-HGF and ¹²⁵I-HGF isoforms can be measured. Cells that normally express the MET receptor are cultured in multiwell plates for the binding assay. The cells are equilibrated in an ice-cold binding buffer and incubated with various concentrations of ¹²⁵I-HGF or ¹²⁵I-HGF isoforms, with or without an excess molar ratio of unlabeled HGF or HGF isoforms. For competitive binding assays, a fixed concentration of ¹²⁵I-HGF and various concentrations of unlabelled HGF or HGF isoforms are incubated with the cells. After the incubation period, the cells are washed, solubilized, and the bound labeled proteins are measured using a γ-counter.

[0497] Binding of isoforms to cell surface molecules can be measured directly or indirectly for one or more than one cell surface molecule. For example, immunoprecipitation can be used to assess cell surface molecule binding. Cell lysates are incubated with an isoform. Antibodies against a cell surface molecule, such as a CSR including an RTK, TNFR, or other ligand receptor, can be used to immunoprecipitate the complex. The amount of isoform in the complex is quantified and/or detected using western blotting of the immunoprecipitates with anti-isoform antibodies.

[0498] 5. Cell Proliferation Assays

[0499] A number of RTKs, for example VEGFRs, are involved in cell proliferation. Effects of an RTK isoform on cell proliferation can be measured. For example, ligand can be added to cells expressing an RTK. An RTK isoform can be added to such cells before, concurrently, or after ligand addition and effects on cell proliferation measured. Alternatively an RTK isoform can be expressed in such cell models, for example using an adenovirus vector. For example, a VEGFR isoform can be added to endothelial cells expressing a VEGFR. Following isoform addition, VEGF ligand is added and the cells are incubated at standard growth temperature (e.g. 37° C.) for several days. Cells are trypsinized, stained with trypan blue and viable cells are counted. Cells not exposed to a VEGFR isoform and/or ligand are used as controls for comparison. Other suitable controls can be employed.

[0500] 6. Motogenic Assays

[0501] CSR or ligand isoforms, such as those produced from isoform fusions provided herein, can be assessed for their ability to interfere with ligand-induced cell motility. For example, endothelial cells are cultured in multiwell plates until firmly adhered to the culture dish surface. Fresh culture medium is then added and overlaid with light mineral oil to prevent evaporation. Medium containing HGF, HGF or MET isoforms, or a combination thereof is added and images are recorded with a digital camera and a time lapse recorder. The distance traveled is calculated from a defined number of cells from each frame.

[0502] Effects of isoforms on ligand-induced cell migration also can be assessed by an endothelial cell wounding assay. Endothelial cells are cultured on plates and grown to reach confluence. Cells are wounded with an 82-gauge needle to produce wounds of approximately 200 μm. The cells are then washed and fresh culture medium is added containing HGF or MET isoforms, HGF, or a combination thereof. Images of cell migration are recorded as described above, and migration distance over the wound front is calculated.

[0503] Cell migration can also be assessed using a modified Boyden chamber assay. Endothelial cells, such as human dermal microvascular endothelial cells, are serum starved and then plated onto the inner chamber of a Transwell plate (6.5 mm diameter polycarbonate membrane, 5 μm pore size, Costar, Cambridge, Mass.) coated with 13.4 μg/ml fibronectin. Medium containing HGF, bFGF or VEGF, or other ligand that induces cell migration, with or without a CSR or ligand isoform, is added to the outer chamber, and incubated for a period of time. The number of cells that migrate through the membrane to the under surface of the filter is quantified by counting the cells in randomly selected microscopic fields in each well.

[0504] 7. Apoptotic Assays

[0505] Many ligands through signaling through specific CSRs exert antiapoptotic effects. For example, HGF exerts an antiapoptotic effect on cells treated with cytotoxic agents, such as irradiation and certain cancer therapeutics, including cisplatin, camtothesin, Adriamycin, and taxol. The ability of HGF or MET isoforms to alter the antiapoptotic effects of HGF treatment can be measured. Cells are cultured with medium containing varying concentrations of HGF or MET isoforms and/or HGF. Cells are then exposed to the cytotoxic agent for an incubation period, and cell viability is measured using a 3-(4,5-dimethylthisazol-2-yl)-2,5-diphenyl tetrazolium bromide (MTT, Sigma) assay.

[0506] Apoptotic cells show characteristic nuclear fragmentation that can be visualized by nuclear stains. Cells treated with HGF show reduced nuclear fragmentation in response to cytotoxic agents. The ability of HGF or MET isoforms to antagonize this effect of HGF can be assessed. Cells are plated onto glass slides and treated with cytotoxic agents followed by HGF and/or HGF or MET isoforms as described above. Nuclei of the cells are visualized using Hoescht 33342 stain and a fluorescent microscope at excitement wavelength of 350 nm and emission wavelength of 450 nm. Other assays to assess for effects of a CSR or ligand isoform on apoptosis can include a DNA fragmentation assay, the DNA filter elution assay, TUNEL stain, measurement of caspase-3 activity, and/or in vitro kinase activity assays for the induction of AKT.

[0507] 8. Cell Disease model Assays

[0508] Cells from a disease or condition or that can be modulated to mimic a disease or condition can be used to measure/and or detect the effect of a CSR isoform. Numerous animal and in vitro disease models are known to those of skill in the art. For example, a CSR isoform is added or expressed in cells and a phenotype is measured or detected in comparison to cells not exposed to or not expressing a CSR isoform. Such assays can be used to measure effects including effects on cell proliferation, metastasis, inflammation, angiogenesis, pathogen infection and bone resorption.

[0509] For example, effects of a MET isoform can be measured using such assays. A liver cell model such as HepG2 liver cells can be used to monitor the infectivity of malaria in culture by sporozoites. An RTK isoform such as a MET isoform can be added to the cells and/or expressed in the cells. Infection of such cells with malaria sporozoites is then measured, such as by staining and counting the EEFs (exoerythrocytic forms) of the sporozoite that are produced as a result of infection (Carrolo et al. (2003) Nat Med 9(11):1363-1369). Effects of an RTK isoform can be assessed by comparing results to cells not exposed or expressing an RTK isoform and/or uninfected cells.

[0510] Effects of a CSR or ligand isoform on angiogenesis also can be measured. For example, tubule formation by endothelial cells such as human umbilical vein endothelial cells (HUVEC) in vitro can be used as an assay to measure angiogenesis and effects on angiogenesis. Addition of varying amounts of a CSR or ligand isoform to an in vitro angiogenesis assay is a method suitable for screening the effectiveness of a CSR or ligand isoform as a modulator of angiogenesis.

[0511] Bone resorption can be measured in cell culture to measure effectiveness of an CSR or ligand isoform, such as by using osteoclast cultures. Osteoclasts are highly differentiated cells of hematopoietic origin that resorb bone in the organism, and are able to resorb bone from bone slices in vitro. Methods for cell culture of osteoclasts and quantitative techniques for measuring bone resorption in osteoclast cell culture have been described in the art. For example, mononuclear cells can be isolated from human peripheral blood and cultured. Addition and/or expression of a CSR or ligand isoform can be used to assess effects on osteoclast formation such as by measuring multinucleated cells positive for tartrate-resistant acid phosphatase and resorbed area and collagen fragments released from bone slices. Dose response curves can be used to determine therapeutically effective amounts of an isoform necessary to modulate bone resorption.

[0512] 9. Animal Models

[0513] Animal models can be used to assess the effect or activity of a CSR or ligand isoform, or modified form thereof containing additional amino acids. Suitable models are known to those of skill in the art. In one example, animal models of a disease can be studied to determine if introduction of an isoform affects the disease. For example, effects of CSR or ligand isoforms on tumor formation including cancer cell proliferation, migration and invasiveness can be measured. In one such assay, cancer cells such as ovarian cancer cells are infected with an adenovirus expressing an isoform, such as an isoform fusion minimally containing a tPA pre/prosequence operatively linked to a sequence of an isoform in the absence of an endogenous signal sequence. After a culturing period in vitro, cells are trypsinized, suspended in a suitable buffer and injected into mice (e.g., subcutaneously into flanks and shoulders of model mice such as Balb/c nude mice). Tumor growth is monitored over time. Control cells, not expressing a CSR or ligand isoform, can be injected into mice for comparison. Similar assays can be performed with other cell types and animal models, for example, NIH3T3 cells, murine lung carcinoma (LLC) cells, primary Pancreatic Adenocarcinoma (PANC-1) cells, TAKA-1 pancreatic ductal cells, and C57BL/6 mice and SCID mice. In a further example, effects of CSR or ligand isoforms on ocular disorders can be assessed using assays such as a corneal micropocket assay. Briefly, mice receive cells expressing an isoform fusion (or control) by injection 2-3 days before the assay. Subsequently, the mice are anesthetized, and pellets of a receptor ligand are implanted into the corneal micropocket of the eyes. Neovascularization is then measured, for example, 5 days following implantation. The effect of a CSR or ligand isoform on angiogenesis and eye phenotype compared to a control is then assessed.

[0514] In an additional example, effects of an isoform in a model of collagen type II-induced arthritis (CIA) can be assessed by intraperitoneal injection of SCID mice with splenocytes from DBA/1 mice that have been transduced with a retroviral vector containing the cDNA of a CSR or ligand isoform fusion or unmodified splenocytes. Mice that receive unmodified splenocytes develop arthritis within 11-13 days and can be used as a reference control to determine effects of isoform-expressing splenocytes on the development of arthritis as assessed, for example, by clinical, histological, or immunological (i.e. antibody levels) parameters of arthritis. In another example, disease can be induced directly in DBA/1 mice by a single intra-dermal injection of bovine type II collagen in the presence or absence of a CSR or ligand isoform, either administered in recombinant form or via gene therapy, and the onset of arthritis can be assessed over time (up to weeks) after immunization.

[0515] Effects of CSR isoforms on animal models of disease additionally can be assessed by the administration of purified or recombinant forms of a CSR or ligand isoform. For example, wound healing can be assessed in a model of impaired wound healing utilizing genetically diabetic db+/db+ mice whereby full-thickness excisional wounds are created on the backs of diabetic mice . Following treatment with an isoform, either topically or systemically, wound healing can be assessed by analyzing for wound closure, inflammatory cell infiltration at the site of the wound, and/or expression of inflammatory cytokines. The effects of isoforms on wound healing can be assessed over time and effects can be compared to mice that receive a control treatment, for example a vehicle only control. In a further example, a recombinant isoform, produced from an isoform fusion such as, for example, a tPA-intron fusion protein fusion, can be administered in a model of pulmonary fibrosis induced by bleomycin or silica to determine if lung fibrosis is reduced as assessed, for example, by analysis of histological sections for lung damage and by assaying for effects on bleomycin/silica induced increases of lung hydroxyproline content.

[0516] Animals deficient in a CSR or ligand isoform also can be used to monitor the biological activity of an isoform. For example an isoform-specific disruption can be made by creating a targeted construct whereby upstream from an IRES-LacZ cassette, translational stop codons are introduced within the appropriate reading frame to ensure that the receptor or ligand protein terminates early. Alternatively, a LoxP/Cre recombination strategy can be used. Following confirmation of the targeted disruption, the consequences of a deficiency in a CSR or ligand isoform can be established by analyzing the phenotype of the deficient mice compared to wildtype mice including the development of various organs such as, for example, lung, limbs, eyelids, anterior pituitary gland, and pancreas. In addition, by histology or isolation of specific cell populations, other parameters, such as apoptosis or cell proliferation, can be assessed to determine if there is a difference between animals or isolated cells lacking an isoform compared to wildtype CSR or ligand. Components of signaling cascades and expression of downstream genes also can be assessed to determine if the absence of a CSR isoform affects receptor signaling and gene expression.

G. Preparation, Formulation and Administration of CSR and Ligand Isoforms and CSR and Ligand Isoform Compositions

[0517] CSR and ligand isoforms and CSR and ligand isoform compositions, particularly modified CSR and ligand isoform polypeptides containing additional amino acids at the N-terminus due to incomplete processing following secretion, the presence of encoded linker sequences, or the presence of an epitope tag, can be formulated for administration by any route known to those of skill in the art including intramuscular, intravenous, intradermal, intraperitoneal, subcutaneous, epidural, nasal, oral, rectal, topical, inhalational, buccal (e.g., sublingual), and transdermal administration or any route. CSR and ligand isoforms can be administered by any convenient route, for example by infusion or bolus injection, by absorption through epithelial or mucocutaneous linings (e.g., oral mucosa, rectal and intestinal mucosa, etc.) and can be administered with other biologically active agents, either sequentially, intermittently or in the same composition. Administration can be local, topical or systemic depending upon the locus of treatment. Local administration to an area in need of treatment can be achieved by, for example, but not limited to, local infusion during surgery, topical application, e.g., in conjunction with a wound dressing after surgery, by injection, by means of a catheter, by means of a suppository, or by means of an implant. Administration also can include controlled release systems including controlled release formulations and device controlled release, such as by means of a pump. The most suitable route in any given case will depend on the nature and severity of the disease or condition being treated and on the nature of the particular composition which is used.

[0518] Various delivery systems are known and can be used to administer CSR or ligand isoforms, including expressed or secreted CSR and ligand isoforms provided herein, such as but not limited to, encapsulation in liposomes, microparticles, microcapsules, recombinant cells capable of expressing the compound, receptor mediated endocytosis, and delivery of nucleic acid molecules encoding CSR isoforms such as retrovirus delivery systems.

[0519] Pharmaceutical compositions containing CSR and ligand isoforms can be prepared. Generally, pharmaceutically acceptable compositions are prepared in view of approvals by a regulatory agency or otherwise prepared in accordance with generally recognized pharmacopeia for use in animals and in humans. Pharmaceutical compositions can include carriers such as a diluent, adjuvant, excipient, or vehicle with which an isoform is administered. Such pharmaceutical carriers can be sterile liquids, such as water and oils, including those of petroleum, animal, vegetable or synthetic origin, such as peanut oil, soybean oil, mineral oil, and sesame oil. Water is a typical carrier when the pharmaceutical composition is administered intravenously. Saline solutions and aqueous dextrose and glycerol solutions also can be employed as liquid carriers, particularly for injectable solutions. Compositions can contain along with an active ingredient: a diluent such as lactose, sucrose, dicalcium phosphate, or carboxymethylcellulose; a lubricant, such as magnesium stearate, calcium stearate and talc; and a binder such as starch, natural gums, such as gum acaciagelatin, glucose, molasses, polvinylpyrrolidine, celluloses and derivatives thereof, povidone, crospovidones and other such binders known to those of skill in the art. Suitable pharmaceutical excipients include starch, glucose, lactose, sucrose, gelatin, malt, rice, flour, chalk, silica gel, sodium stearate, glycerol monostearate, talc, sodium chloride, dried skim milk, glycerol, propylene, glycol, water, and ethanol. A composition, if desired, also can contain minor amounts of wetting or emulsifying agents, or pH buffering agents, for example, acetate, sodium citrate, cyclodextrine derivatives, sorbitan monolaurate, triethanolamine sodium acetate, triethanolamine oleate, and other such agents. These compositions can take the form of solutions, suspensions, emulsion, tablets, pills, capsules, powders, and sustained release formulations. A composition can be formulated as a suppository, with traditional binders and carriers such as triglycerides. Oral formulation can include standard carriers such as pharmaceutical grades of mannitol, lactose, starch, magnesium stearate, sodium saccharine, cellulose, magnesium carbonate, and other such agents. Examples of suitable pharmaceutical carriers are described in “Remington's Pharmaceutical Sciences” by E. W. Martin. Such compositions will contain a therapeutically effective amount of the compound, generally in purified form, together with a suitable amount of carrier so as to provide the form for proper administration to the patient. The formulation should suit the mode of administration.

[0520] Formulations are provided for administration to humans and animals in unit dosage forms, such as tablets, capsules, pills, powders, granules, sterile parenteral solutions or suspensions, and oral solutions or suspensions, and oil water emulsions containing suitable quantities of the compounds or pharmaceutically acceptable derivatives thereof. Pharmaceutical therapeutically active compounds and derivatives thereof are typically formulated and administered in unit dosage forms or multiple dosage forms. Each unit dose contains a predetermined quantity of therapeutically active compound sufficient to produce the desired therapeutic effect, in association with the required pharmaceutical carrier, vehicle or diluent. Examples of unit dose forms include ampoules and syringes and individually packaged tablets or capsules. Unit dose forms can be administered in fractions or multiples thereof. A multiple dose form is a plurality of identical unit dosage forms packaged in a single container to be administered in segregated unit dose form. Examples of multiple dose forms include vials, bottles of tablets or capsules or bottles of pints or gallons. Hence, multiple dose form is a multiple of unit doses that are not segregated in packaging.

[0521] Dosage forms or compositions containing active ingredient in the range of 0.005% to 100% with the balance made up from non-toxic carrier can be prepared. For oral administration, pharmaceutical compositions can take the form of, for example, tablets or capsules prepared by conventional means with pharmaceutically acceptable excipients such as binding agents (e.g., pregelatinized maize starch, polyvinyl pyrrolidone or hydroxypropyl methylcellulose); fillers (e.g., lactose, microcrystalline cellulose or calcium hydrogen phosphate); lubricants (e.g., magnesium stearate, talc or silica); disintegrants (e.g., potato starch or sodium starch glycolate); or wetting agents (e.g., sodium lauryl sulphate). The tablets can be coated by methods well-known in the art.

[0522] Pharmaceutical preparation also can be in liquid form, for example, solutions, syrups or suspensions, or can be presented as a drug product for reconstitution with water or other suitable vehicle before use. Such liquid preparations can be prepared by conventional means with pharmaceutically acceptable additives such as suspending agents (e.g., sorbitol syrup, cellulose derivatives or hydrogenated edible fats); emulsifying agents (e.g., lecithin or acacia); non-aqueous vehicles (e.g., almond oil, oily esters, or fractionated vegetable oils); and preservatives (e.g., methyl or propyl-p-hydroxybenzoates or sorbic acid).

[0523] Formulations suitable for rectal administration can be provided as unit dose suppositories. These can be prepared by admixing the active compound with one or more conventional solid carriers, for example, cocoa butter, and then shaping the resulting mixture.

[0524] Formulations suitable for topical application to the skin or to the eye include ointments, creams, lotions, pastes, gels, sprays, aerosols and oils. Exemplary carriers include Vaseline, lanoline, polyethylene glycols, alcohols, and combinations of two or more thereof. The topical formulations also can contain 0.05 to 15, 20, 25 percent by weight of thickeners selected from among hydroxypropyl methyl cellulose, methyl cellulose, polyvinylpyrrolidone, polyvinyl alcohol, poly (alkylene glycols), poly/hydroxyalkyl, (meth)acrylates or poly(meth)acrylamides. A topical formulation is often applied by instillation or as an ointment into the conjunctival sac. It also can be used for irrigation or lubrication of the eye, facial sinuses, and external auditory meatus. It also can be injected into the anterior eye chamber and other places. A topical formulation in the liquid state can be also present in a hydrophilic three-dimensional polymer matrix in the form of a strip or contact lens, from which the active components are released.

[0525] For administration by inhalation, the compounds for use herein can be delivered in the form of an aerosol spray presentation from pressurized packs or a nebulizer, with the use of a suitable propellant, e.g., dichlorodifluoromethane, trichlorofluoromethane, dichlorotetrafluoroethane, carbon dioxide or other suitable gas. In the case of a pressurized aerosol, the dosage unit can be determined by providing a valve to deliver a metered amount. Capsules and cartridges of, e.g., gelatin, for use in an inhaler or insufflator can be formulated containing a powder mix of the compound and a suitable powder base such as lactose or starch.

[0526] Formulations suitable for buccal (sublingual) administration include, for example, lozenges containing the active compound in a flavored base, usually sucrose and acacia or tragacanth; and pastilles containing the compound in an inert base such as gelatin and glycerin or sucrose and acacia.

[0527] Pharmaceutical compositions of CSR and ligand isoforms can be formulated for parenteral administration by injection, e.g., by bolus injection or continuous infusion. Formulations for injection can be presented in unit dosage form, e.g., in ampoules or in multi-dose containers, with an added preservative. The compositions can be suspensions, solutions or emulsions in oily or aqueous vehicles, and can contain formulatory agents such as suspending, stabilizing and/or dispersing agents. Alternatively, the active ingredient can be in powder form for reconstitution with a suitable vehicle, e.g., sterile pyrogen-free water or other solvents, before use.

[0528] Formulations suitable for transdermal administration can be presented as discrete patches adapted to remain in intimate contact with the epidermis of the recipient for a prolonged period of time. Such patches suitably contain the active compound as an optionally buffered aqueous solution of, for example, 0.1 to 0.2M concentration with respect to the active compound. Formulations suitable for transdermal administration also can be delivered by iontophoresis (see, e.g., Pharmaceutical Research 3(6), 318 (1986)) and typically take the form of an optionally buffered aqueous solution of the active compound.

[0529] Pharmaceutical compositions also can be administered by controlled release means and/or delivery devices (see, e.g., in U.S. Pat. Nos. 3,536,809; 3,598,123; 3,630,200; 3,845,770; 3,847,770; 3,916,899; 4,008,719; 4,687,610; 4,769,027; 5,059,595; 5,073,543; 5,120,548; 5,354,566; 5,591,767; 5,639,476; 5,674,533 and 5,733,566).

[0530] In certain embodiments, liposomes and/or nanoparticles may also be employed with CSR isoform administration. Liposomes are formed from phospholipids that are dispersed in an aqueous medium and spontaneously form multilamellar concentric bilayer vesicles, also termed multilamellar vesicles (MLVs). MLVs generally have diameters of from 25 nm to 4 μm. Sonication of MLVs results in the formation of small unilamellar vesicles (SUVs) with diameters in the range of 200 to 500 ANG., containing an aqueous solution in the core.

[0531] Phospholipids can form a variety of structures other than liposomes when dispersed in water, depending on the molar ratio of lipid to water. At low ratios, the liposomes form. Physical characteristics of liposomes depend on pH, ionic strength and the presence of divalent cations. Liposomes can show low permeability to ionic and polar substances, but at elevated temperatures undergo a phase transition which markedly alters their permeability. The phase transition involves a change from a closely packed, ordered structure, known as the gel state, to a loosely packed, less-ordered structure, known as the fluid state. This occurs at a characteristic phase-transition temperature and results in an increase in permeability to ions, sugars and drugs.

[0532] Liposomes interact with cells via different mechanisms: Endocytosis by phagocytic cells of the reticuloendothelial system such as macrophages and neutrophils; adsorption to the cell surface, either by nonspecific weak hydrophobic or electrostatic forces, or by specific interactions with cell-surface components; fusion with the plasma cell membrane by insertion of the lipid bilayer of the liposome into the plasma membrane, with simultaneous release of liposomal contents into the cytoplasm; and by transfer of liposomal lipids to cellular or subcellular membranes, or vice versa, without any association of the liposome contents. Varying the liposome formulation can alter which mechanism is operative, although more than one may operate at the same time.

[0533] Nanocapsules can generally entrap compounds in a stable and reproducible way. To avoid side effects due to intracellular polymeric overloading, such ultrafine particles (sized around 0.1 μm) should be designed using polymers able to be degraded in vivo. Biodegradable polyalkyl-cyanoacrylate nanoparticles that meet these requirements are contemplated for use herein, and such particles can be easily made.

[0534] Administration methods can be employed to decrease the exposure of CSR or ligand isoforms to degradative processes, such as proteolytic degradation and immunological intervention via antigenic and immunogenic responses. Examples of such methods include local administration at the site of treatment. Pegylation of therapeutics has been reported to increase resistance to proteolysis, increase plasma half-life, and decrease antigenicity and immunogenicity. Examples of pegylation methodologies are known in the art (see for example, Lu and Felix, Int. J. Peptide Protein Res., 43: 127-138, 1994; Lu and Felix, Peptide Res., 6: 142-6, 1993; Felix et al., Int. J. Peptide Res., 46: 253-64, 1995; Benhar et al., J. Biol. Chem., 269: 13398-404, 1994; Brumeanu et al., J Immunol., 154: 3088-95, 1995; see also, Caliceti et al. (2003) Adv. Drug Deliv. Rev. 55(10):1261-77 and Molineux (2003) Pharmacotherapy 23 (8 Pt 2):3S-8S). Pegylation also can be used in the delivery of nucleic acid molecules in vivo. For example, pegylation of adenovirus can increase stability and gene transfer (see, e.g., Cheng et al. (2003) Pharm. Res. 20(9): 1444-51).

[0535] Desirable blood levels can be maintained by a continuous infusion of the active agent as ascertained by plasma levels. It should be noted that the attending physician would know how, and when, to terminate, interrupt or adjust therapy to lower dosage due to toxicity, or bone marrow, liver or kidney dysfunctions. Conversely, the attending physician would also know how, and when, to adjust treatment to higher levels if the clinical response is not adequate (precluding toxic side effects). The active agent is administered, for example, by oral, pulmonary, parental (intramuscular, intraperitoneal, intravenous (IV) or subcutaneous injection), inhalation (via a fine powder formulation), transdermal, nasal, vaginal, rectal, or sublingual routes of administration and can be formulated in dosage forms appropriate for each route of administration (see, e.g., International PCT application Nos. WO 93/25221 and WO 94/17784; and European Patent Application 613,683).

[0536] A CSR or ligand isoform is included in the pharmaceutically acceptable carrier in an amount sufficient to exert a therapeutically useful effect in the absence of undesirable side effects on the patient treated. Therapeutically effective concentrations can be determined empirically by testing the compounds in known in vitro and in vivo systems, such as the assays provided herein.

[0537] The concentration-a CSR or ligand isoform in the composition will depend upon absorption, inactivation and excretion rates of the complex, the physicochemical characteristics of the complex, the dosage schedule, and amount administered as well as other factors known to those of skill in the art. The amount of a CSR or ligand isoform to be administered for the treatment of a disease or condition, for example cancer, autoimmune disease and infection can be determined by standard clinical techniques. In addition, in vitro assays and animal models can be employed to help identify optimal dosage ranges. The precise dosage, which can be determined empirically, can depend upon the route of administration and the seriousness of the disease. Suitable dosage ranges for administration can range from about 0.01 pg/kg body weight to 1 mg/kg body weight and more typically 0.05 mg/kg to 200 mg/kg CSR isoform: patient weight.

[0538] A CSR or ligand isoform can be administered at once, or can be divided into a number of smaller doses to be administered at intervals of time. CSR or ligand isoforms can be administered in one or more doses over the course of a treatment time for example over several hours, days, weeks, or months. In some cases, continuous administration is useful. It is understood that the precise dosage and duration of treatment is a function of the disease being treated and can be determined empirically using known testing protocols or by extrapolation from in vivo or in vitro test data. It is to be noted that concentrations and dosage values also can vary with the severity of the condition to be alleviated. It is to be further understood that for any particular subject, specific dosage regimens should be adjusted over time according to the individual need and the professional judgment of the person administering or supervising the administration of the compositions, and that the concentration ranges set forth herein are exemplary only and are not intended to limit the scope or use of compositions and combinations containing them.

H. In vivo Expression of CSR and Ligand Isoforms and Gene Therapy

[0539] CSR and ligand isoforms, particularly modified CSR and ligand isoforms that contain additional amino acids at their N-terminus following expression and secretion, can be delivered to cells and tissues by expression of nucleic acid molecules. CSR and ligand isoforms can be administered as nucleic acid molecules encoding a CSR or ligand isoform, including ex vivo techniques and direct in vivo expression.

[0540] 1. Delivery of Nucleic Acids

[0541] Nucleic acids, such as but not limited to any set forth in any of SEQ ID NOS: 31, 33, 35, 37, 39, 41, 43, 45, or 47 can be delivered to cells and tissues by any method known to those of skill in the art.

[0542] a. Vectors—Episomal and Integrating

[0543] Methods for administering CSR and ligand isoforms by expression of encoding nucleic acid molecules include administration of recombinant vectors. The vector can be designed to remain episomal, such as by inclusion of an origin of replication or can be designed to integrate into a chromosome in the cell.

[0544] CSR and ligand isoforms also can be used in ex vivo gene expression therapy using non-viral vectors. For example, cells can be engineered to express a CSR and ligand isoform, such as by integrating a CSR and ligand isoform encoding-nucleic acid into a genomic location, either operatively linked to regulatory sequences or such that it is placed operatively linked to regulatory sequences in a genomic location. Such cells then can be administered locally or systemically to a subject, such as a patient in need of treatment.

[0545] Viral vectors, including, for example adenoviruses, herpes viruses, retroviruses and others designed for gene therapy, can be employed. The vectors can remain episomal or can integrate into chromosomes of the treated subject. A CSR or ligand isoform can be expressed by a virus, which is administered to a subject in need of treatment. Virus vectors suitable for gene therapy include adenovirus, adeno-associated virus, retroviruses, lentiviruses and others noted above. For example, adenovirus expression technology is well-known in the art and adenovirus production and administration methods also are well known. Adenovirus serotypes are available, for example, from the American Type Culture Collection (ATCC, Rockville, Md.). Adenovirus can be used ex vivo, for example, cells are isolated from a patient in need of treatment, and transduced with a CSR or ligand isoform-expressing adenovirus vector. After a suitable culturing period, the transduced cells are administered to a subject, locally and/or systemically. Alternatively, CSR or ligand isoform-expressing adenovirus particles are isolated and formulated in a pharmaceutically-acceptable carrier for delivery of a therapeutically effective amount to prevent, treat or ameliorate a disease or condition of a subject. Typically, adenovirus particles are delivered at a dose ranging from 1 particle to 1014 particles per kilogram subject weight, generally between 106 or 108 particles to 1012 particles per kilogram subject weight. In some situations it is desirable to provide a nucleic acid source with an agent that targets cells, such as an antibody specific for a cell surface membrane protein or a target cell, or a ligand for a receptor on a target cell.

[0546] b. Artificial Chromosomes and other Non-Viral Vector Delivery Methods

[0547] CSR or ligand isoforms, also can be used in ex vivo gene expression therapy using non-viral vectors. For example, cells can be engineered which express a CSR or ligand isoform, such as by integrating a CSR or ligand isoform sequence into a genomic location, either operatively linked to regulatory sequences or such that it is placed operatively linked to regulatory sequences in a genomic location. Such cells then can be administered locally or systemically to a subject, such as a patient in need of treatment.

[0548] The nucleic acid molecules can be introduced into artificial chromosomes and other non-viral vectors. Artificial chromosomes (see, e.g., U.S. Pat. No. 6,077,697 and PCT International PCT application No. WO 02/097059) can be engineered to encode and express the isoform.

[0549] c. Liposomes and Other Encapsulated Forms and Administration of Cells Containing the Nucleic Acids

[0550] The nucleic acids can be encapsulated in a vehicle, such as a liposome, or introduced into a cell, such as a bacterial cell, particularly an attenuated bacterium or introduced into a viral vector. For example, when liposomes are employed, proteins that bind to a cell surface membrane protein associated with endocytosis can be used for targeting and/or to facilitate uptake, e.g. capsid proteins or fragments thereof tropic for a particular cell type, antibodies for proteins which undergo internalization in cycling, and proteins that target intracellular localization and enhance intracellular half-life.

[0551] 2. In vitro and Ex vivo Delivery

[0552] For ex vivo and in vivo methods, nucleic acid molecules encoding the CSR or ligand isoform are introduced into cells that are from a suitable donor or the subject to be treated. In vivo expression of a CSR or ligand isoform can be linked to expression of additional molecules. For example, expression of a CSR or ligand isoform can be linked with expression of a cytotoxic product such as in an engineered virus or expressed in a cytotoxic virus. Such viruses can be targeted to a particular cell type that is a target for a therapeutic effect. The expressed CSR or ligand isoform, particularly expressed and secreted modified forms of CSR and ligand isoforms containing additional amino acids at their N-terminus, can be used to enhance the cytotoxicity of the virus.

[0553] In vivo expression of a CSR or ligand isoform can include operatively linking a CSR or ligand isoform encoding nucleic acid molecule to specific regulatory sequences such as a cell-specific or tissue-specific promoter. CSR or ligand isoforms also can be expressed from vectors that specifically infect and/or replicate in target cell types and/or tissues. Inducible promoters can be use to selectively regulate CSR or ligand isoform expression.

[0554] Cells into which a nucleic acid can be introduced for purposes of therapy encompass any desired, available cell type appropriate for the disease or condition to be treated, including but not limited to epithelial cells, endothelial cells, keratinocytes, fibroblasts, muscle cells, hepatocytes; blood cells such as T lymphocytes, B lymphocytes, monocytes, macrophages, neutrophils, eosinophils, megakaryocytes, granulocytes; various stem or progenitor cells, in particular hematopoietic stem or progenitor cells, e.g., such as stem cells obtained from bone marrow, umbilical cord blood, peripheral blood, fetal liver, and other sources thereof. Tumor cells also can be target cells for in vivo expression of CSR or ligand isoforms. Cells used for in vivo expression of an isoform also include cells autologous to the patient. Such cells can be removed from a patient, nucleic acids for expression of a CSR or ligand isoform introduced, and then administered to a patient such as by injection or engraftment.

[0555] Techniques suitable for the transfer of nucleic acid into mammalian cells in vitro include the use of liposomes and cationic lipids (e.g., DOTMA, DOPE and DC-Chol) electroporation, microinjection, cell fusion, DEAE-dextran, and calcium phosphate precipitation methods. Methods of DNA delivery can be used to express CSR isoforms in vivo. Such methods include liposome delivery of nucleic acids and naked DNA delivery, including local and systemic delivery such as using electroporation, ultrasound and calcium-phosphate delivery. Other techniques include microinjection, cell fusion, chromosome-mediated gene transfer, microcell-mediated gene transfer and spheroplast fusion.

[0556] For ex vivo treatment, cells from a donor compatible with the subject to be treated or cells from the subject to be treated are removed, the nucleic acid is introduced into these isolated cells and the modified cells are administered to the subject.

[0557] Treatment includes direct administration, such as for, for example, encapsulated within porous membranes, which are implanted into the patient (see, e.g. U.S. Pat. Nos. 4,892,538 and 5,283,187). Techniques suitable for the transfer of nucleic acid into mammalian cells in vitro include the use of liposomes and cationic lipids (e.g., DOTMA, DOPE and DC-Chol) electroporation, microinjection, cell fusion, DEAE-dextran, and calcium phosphate precipitation methods. Methods of DNA delivery can be used to express CSR isoforms in vivo. Such methods include liposome delivery of nucleic acids and naked DNA delivery, including local and systemic delivery such as using electroporation, ultrasound and calcium-phosphate delivery. Other techniques include microinjection, cell fusion, chromosome-mediated gene transfer, microcell-mediated gene transfer and spheroplast fusion.

[0558] In vivo expression of a CSR or ligand isoform can be linked to expression of additional molecules. For example, expression of a CSR or ligand isoform can be linked with expression of a cytotoxic product such as in an engineered virus or expressed in a cytotoxic virus. Such viruses can be targeted to a particular cell type that is a target for a therapeutic effect. The expressed CSR or ligand isoform can be used to enhance the cytotoxicity of the virus.

[0559] In vivo expression of a CSR or ligand isoform can include operatively linking a CSR or ligand isoforn encoding nucleic acid molecule to specific regulatory sequences such as a cell-specific or tissue-specific promoter. CSR or ligand isoforms also can be expressed from vectors that specifically infect and/or replicate in target cell types and/or tissues. Inducible promoters can selectively regulate CSR or ligand isoform expression. Additionally, in vivo expression of CSR or ligand isoforms can include operative linkage of a CSR or ligand isoform encoding nucleic acid with a sequence, such as a precursor sequence including a tPA pre/prosequence, to effect secretion of the CSR or ligand isoform from a target cell type.

[0560] 3. Systemic, Local and Topical Delivery

[0561] Nucleic acid molecules, as naked nucleic acids or in vectors, artificial chromosomes, liposomes and other vehicles can be administered to the subject by systemic administration, topical, local and other routes of administration. When systemic and in vivo, the nucleic acid molecule or vehicle containing the nucleic acid molecule can be targeted to a cell.

[0562] Administration also can be direct, such as by administration of a vector or cells that typically targets a cell or tissue. For example, tumor cells and proliferating cells can be targeted cells for in vivo expression of CSR or ligand isoforms. Cells used for in vivo expression of an isoform also include cells autologous to the patient. Such cells can be removed from a patient, nucleic acids for expression of a CSR or ligand isoform introduced, and then administered to a patient such as by injection or engraftment.

[0563] I. Exemplary Treatments and Studies with CSR Isoforms

[0564] Provided herein are methods of treatment of disease and conditions with CSR or ligand isoforms, particularly modified CSR or ligand isoforms that contain one or more additional amino acids at the N-terminus following expression and secretion of the isoform. Included among modified CSR or ligand isoforms are, for example, those isoforms having additional amino acids at the N-terminus due to incomplete processing following secretion (i.e. GAR), the presence of encoded linker sequences (i.e. LE or SR), and/or the presence of an epitope tag (i.e. c-myc or His-tag). Such CSR and ligand isoforms or nucleic acids encoding CSR and ligand isoforms, such as RTK isoforms, TNFR isoforms, RAGE isoforms, and ligand isoforms including HGF isoforms can be used in the treatment of a variety of diseases and conditions, including those described herein. Typically, treatment of a disease, disorder, or condition by a polypeptide isoform provided herein, or a nucleic acid encoding a polypeptide isoform, is one which is mediated by a cognate receptor or ligand. For example, chronic activation induced by RAGE-mediated signaling contributes to disease progression in age-related macular degeneration. Hence, treatment of age-related macular degeneration with a RAGE isoform, such as any provided herein, can be used as a treatment of age-related macular degeneration and other angiogenic conditions. Contributions of cognate CSRs and ligands to other various diseases and disorders are known to one of skill in the art, and are exemplified herein below.

[0565] Treatment can be effected by administering by suitable route formulations of the polypeptides, which can be provided in compositions as polypeptides and can be linked to targeting agents for targeted delivery or encapsulated in delivery vehicles, such as liposomes. Alternatively, nucleic acids encoding the polypeptides can be administered as naked nucleic acids or in vectors, particularly gene therapy vectors. Gene therapy can be effected by any method known to those of skill in the art. Gene therapy can be effected in vivo by directly administering the nucleic acid or vector. For example, the nucleic acids can be delivered systemically, locally, topically or by any suitable route. The vectors or nucleic acids can be targeted by including targeting agents in the delivery vehicle, such as a virus or liposome, or they can be conjugated to a targeting agent, such as an antibody. The vectors or nucleic acids can be introduced into cells ex vivo by removing cells from a subject or suitable donor, introducing the vector or nucleic acid into the cells and then introducing the modified cells into the subject.

[0566] The CSR isoforms or ligand isoforms provided herein, particularly modified isoforms containing additional amino acids at the N-terminus due to incomplete processing, the presence of an encoded linker sequence, or the presence of an epitope tag, can be used for treating a variety of disorders, particularly proliferative, immune and inflammatory disorders. Treatments include, but are not limited to, treatment of angiogenesis-related diseases and conditions including ocular diseases, atherosclerosis, cancer and vascular injuries, neurodegenerative diseases, including Alzheimer's disease, inflammatory diseases and conditions, including atherosclerosis, diseases and conditions associated with cell proliferation including cancers, and smooth muscle cell-associated conditions, and various autoimmune diseases. Exemplary treatments and preclinical studies are described for treatments and therapies with RTK isoforms, TNFR isoforms, RAGE isoforms, or HGF isoforms. Such descriptions are meant to be exemplary only and are not limited to a particular RTK, TNFR, RAGE, or HGF isoform. The particular treatment and dosage can be determined by one of skill in the art. Considerations in assessing treatment include; the disease to be treated, the severity and course of the disease, whether the molecule is administered for preventive or therapeutic purposes, previous therapy, the patient's clinical history and response to therapy, and the discretion of the attending physician.

[0567] 1. Angiogenesis-Related Conditions

[0568] CSR isoforms including, but not limited to, RTK isoforms including VEGFR, PDGFR, MET, TIE/TEK, EGFR, and EphA, TNFR isoforms including TNFR1 and TNFR2, RAGE isoforms, and HGF isoforms can be used in treatment of angiogenesis-related diseases and conditions, such as ocular diseases and conditions, including ocular diseases involving neovascularization. Ocular neovascular disease is characterized by invasion of new blood vessels into the structures of the eye, such as the retina or cornea. It is the most common cause of blindness and is involved in approximately twenty eye diseases. In age-related macular degeneration, the associated visual problems are caused by an ingrowth of choroidal capillaries through defects in Bruch's membrane with proliferation of fibrovascular tissue beneath the retinal pigment epithelium. Angiogenic damage also is associated with diabetic retinopathy, retinopathy of prematurity, corneal graft rejection, neovascular glaucoma and retrolental fibroplasia. Other diseases associated with corneal neovascularization include, but are not limited to, epidemic keratoconjunctivitis, Vitamin A deficiency, contact lens overwear, atopic keratitis, superior limbic keratitis, pterygium keratitis sicca, sjogrens, acne rosacea, phylectenulosis, syphilis, Mycobacteria infections, lipid degeneration, chemical bums, bacterial ulcers, fungal ulcers, Herpes simplex infections, Herpes zoster infections, protozoan infections, Karposi sarcoma, Mooren ulcer, Terrien's marginal degeneration, marginal keratolysis, rheumatoid arthritis, systemic lupus, polyarteritis, trauma, Wegeners sarcoidosis, Scleritis, Steven's Johnson disease, periphigoid radial keratotomy, and corneal graph rejection. Diseases associated with retinal/choroidal neovascularization include, but are not limited to, diabetic retinopathy, macular degeneration, sickle cell anemia, sarcoid, syphilis, pseudoxanthoma elasticum, Pagets disease, vein occlusion, artery occlusion, carotid obstructive disease, chronic uveitis/vitritis, mycobacterial infections, Lyme's disease, systemic lupus erythematosus, retinopathy of prematurity, Eales disease, Bechets disease, infections causing a retinitis or choroiditis, presumed ocular histoplasmosis, Bests disease, myopia, optic pits, Stargardt's disease, pars planitis, chronic retinal detachment, hyperviscosity syndromes, toxoplasmosis, trauma and post-laser complications. Other diseases include, but are not limited to, diseases associated with rubeosis (neovascularization of the angle) and diseases caused by the abnormal proliferation of fibrovascular or fibrous tissue including all forms of proliferative vitreoretinopathy.

[0569] The therapeutic effect of CSR and ligand isoforms, including modified forms of CSR and ligand isoforms, on angiogenesis such as in treatment of ocular diseases can be assessed in animal models, for example in cornea implants, such as described herein. For example, modulation of angiogenesis such as for an RTK can be assessed in a nude mouse model such as epidermoid A43 1 tumors in nude mice and VEGF-or PIGF-transduced rat C6 gliomas implanted in nude mice. CSR or ligand isoforms can be injected as protein locally or systemically. Alternatively cells expressing CSR isoforms can be inoculated locally or at a site remote to the tumor. Tumors can be compared between control-treated and CSR isoform-treated models to observe phenotypes of tumor inhibition including poorly vascularized and pale tumors, necrosis, reduced proliferation and increased tumor-cell apoptosis. In one such treatment, Flt-1 isoforms are used to treat ocular disease and assessed in such models.

[0570] Examples of ocular disorders that can be treated with TIE/TEK isoforms are eye diseases characterized by ocular neovascularization including, but not limited to, diabetic retinopathy (a major complication of diabetes), retinopathy of prematurity (this devastating eye condition, that frequently leads to chronic vision problems and carries a high risk of blindness, is a severe complication during the care of premature infants), neovascular glaucoma, retinoblastoma, retrolental fibroplasia, rubeosis, uveitis, macular degeneration, and corneal graft neovascularization. Other eye inflammatory diseases, ocular tumors, and diseases associated with choroidal or iris neovascularization also can be treated with TIE/TEK isoforms.

[0571] For example, CSR and ligand isoforms, including RAGE isoforms, can be used in treatment of ocular diseases and conditions, including age-related macular degeneration. Age-related macular degeneration is associated with vision loss resulting from accumulated macular drusen, extracellular deposits in Brusch's membrane, and retinal pigment epithelium (RPE) dysfunction due to degenerative cellular and molecular changes in RPE and photoreceptors overlying the macular drusen. The cellular and molecular changes occurring in the RPE, in part due to oxidative stress in the aging eye, include altered expression of genes for cytokines, matrix organization, cell adhesion, and apoptosis resulting in the possible induction of a focal inflammatory response at the RPE-Bruch's membrane border. For example, oxidative stress induces the accumulation of RAGE ligands in the RPE and photoreceptor layers in early age-related macular degeneration. The accumulated RAGE ligands stimulate RAGE-expressing RPE cells to induce a variety of inflammatory events including NFκB nuclear localization, apoptosis, and most importantly the upregulation of the RAGE receptor itself initiating a positive feedback loop sustained by continued ligand availability. The chronic activation induced by the ligand/RAGE-mediated signaling contributes to disease progression in age-related macular degeneration. Treatment of early stage age-related macular generation with CSR or ligand isoforms can ameliorate one or more symptoms of the disease.

[0572] PDGFR isoforms also can be used in the treatment of proliferative vitreoretinopathy. For example, an expression vector such as a retroviral vector is constructed containing a nucleic acid molecule encoding a PDGFR isoform. Rabbit conjunctival fibroblasts (RCFs) are produced which contain the expression vector by transfection, such for a retrovirus vector, or by transformation, such as for a plasmid or chromosomal based vector. Expression of a PDGFR isoform can be monitored in cells by means known in the art including use of an antibody which recognizes PDGFR isoforms and by use of a peptide tag (e.g a myc tag) and corresponding antibody. RCFs are injected into the vitreous part of an eye. For example, in a rabbit animal model, approximately 1×10⁵ RCFs are injected by gas vitreomy. Retrovirus expressing a PDGFR isoform, ˜2×10⁷ CFU, is injected on the same day. Effects on proliferative vitreoretinopathy can be observed, for example, 2-4 weeks following surgery, such as attenuation of the disease symptoms.

[0573] EphA isoforms can be used to treat diseases or conditions with misregulated and/or inappropriate angiogenesis, such as in eye diseases. For example, an EphA isoform can be assessed in an animal model such as a mouse corneal model for effects on ephrinA-1 induced angiogenesis. Hydron pellets containing ephrinA-1 alone or with EphA isoform protein are implanted in mouse cornea. Visual observations are taken on days following implantation to observe EphA isoform inhibition or reduction of angiogenesis. Anti-angiogenic treatments and methods such as described for VEGFR isoforms are applicable to EphA isoforms.

[0574] 2. Angiogenesis Related Atherosclerosis

[0575] CSR and ligand isoforms including RTK isoforms, for example VEGFR Flt-I and TIE/TEK isoforms, can be used to treat angiogenesis conditions related to atherosclerosis such as neovascularization of atherosclerosis plaques. Plaques formed within the lumen of blood vessels have been shown to have angiogenic stimulatory activity. VEGF expression in human coronary atherosclerotic lesions is associated with the progression of human coronary atherosclerosis.

[0576] Animal models can be used to assess CSR and ligand isoforms in treatment of atherosclerosis. Apolipoprotein-E deficient mice (ApoE^{-/-}) are prone to atherosclerosis. Such mice are treated by injecting an RTK isoform, for example a VEGFR isoform, such as a Flt-1 intron fusion protein over a time course such as for 5 weeks starting at 5, 10 and 20 weeks of age. Lesions at the aortic root are assessed between control ApoE^{-/-} mice and isoform-treated ApoE^{-/-} mice to observe reduction of atherosclerotic lesions in isoform-treated mice.

[0577] 3. Angiogenesis Related Diabetes

[0578] CSR and ligand isoforms, including RAGE isoforms, can be used to treat diabetes-related disease conditions such as vascular disease, periodontal disease, and autoimmune disease. Diabetes can occur by two main forms: type 1 diabetes is characterized by a progressive destruction of pancreatic β-islet cells which results in insulin deficiency; type 2 diabetes is characterized by an increased resistance and/or deficient secretion of insulin leading to hyperglycemia. Complications which result from hyperglycemia, such as myocardial infarction, stroke, and amputation of digits or limbs, can result in morbidity and mortality. Hyperglycemia results in sustained accumulation of RAGE ligands and signaling of RAGE by its ligands contributes to enhanced expression of the RAGE receptor in the diabetic tissue and chronic ligand-mediated RAGE signaling.

[0579] a. Vascular Disease

[0580] CSR and ligand isoforms, such as for example, RAGE isoforms, can be used to treat diabetes-related vascular disease, including both macrovascular and microvascular disease. Hyperglycemia occurring in type 2 diabetes results in chronic vascular injury characterized by a variety of macrovascular perturbations including the development of atherosclerotic plaques, enhanced proliferation of vascular smooth muscle, production of extracellular matrix, and vascular inflammation. Vascular inflammation can be caused and exacerbated by engagement of RAGE by its ligands leading to chronic vascular inflammation, accelerated atherosclerosis, and exaggerated restenosis after revascularization procedures. RAGE isoforms can be employed to block the ligation of RAGE by its ligands to suppress the vascular complications of diabetes. For example, in animal models of diabetes-associated hyperpermeability, treatment of animals with soluble RAGE isoform can lead to near normalization of tissue permeability. In another example of diabetes-related vascular disease, animal models of hyperlipidemia, such as ApoE−/− mice or LDL receptor−/− mice, that have been induced to develop diabetes, display increased accumulation of RAGE ligands and enhanced expression of RAGE. Treatment of diabetic mice with a soluble RAGE isoform can diminish diabetes-related atherogenesis as evidenced by reduced atherosclerotic lesion area size and decreased levels of tissue factor, VCAM-1, and NFκB compared with vehicle-treated mice. Treatment with RAGE isoforms to block diabetic atherosclerosis can be given any time during disease progression including after establishment of atherosclerotic plaques.

[0581] Diabetes-related vascular disease also can manifest in the microvasculature affecting the eyes, kidney, and peripheral nerves. Importantly, renal disease accounts for the largest percentage of mortality of any diabetes-specific complication. RAGE isoforms can be used to treat diabetes-related vascular disease, including kidney disease. For example, in a mouse model of diabetes, insulin-resistant db/db mouse, RAGE is upregulated in the glomerulus of the kidney particularly in the podocyte cells and likewise, RAGE-ligand expressing mononuclear phagocytes also are accumulated in the glomerulus. Treatment of db/db mice with a soluble RAGE isoform blocks VEGF expression, a factor known to mediate hyperpermeability and recruitment of mononuclear phagocytes into the glomerulus. Further treatment with RAGE isoforms also decrease glomerular and mesangial expansion and decrease the albumin excretion rate.

[0582] CSR and ligand isoforms, including RAGE isoforms, also can be used to treat diabetes-related vascular disease associated with wound healing. Chronic wound healing is often associated with diabetes and can lead to complications such as infection and amputation. Using the db/db mouse model of type 2 diabetes, a wound healing model can be established by performing full-thickness excisional wounds to generate chronic ulcers. In such a model, the levels of RAGE and its ligands are enhanced. Treatment of mice with a soluble RAGE isoform can increase wound closure by suppressing levels of cytokines including IL-6, TNF-α, and MMP-2, 3, and 9. This reduction in cytokine levels contributes to reduced chronic inflammation and ultimately enhances the generation of a thick, well-vascularized granulation tissue and increased levels of VEGF and PDGF-B.

[0583] b. Periodontal Disease

[0584] CSR and ligand isoforms, including RAGE isoforms, can be used to treat diabetes-related periodontal disease. Diabetes is a risk factor for the development of periodontal disease due to multiple factors including, for example, impaired host defenses upon invasion of bacterial pathogens, and exaggerated inflammatory responses once infection is established. An inappropriate immune response can lead to alveolar bone loss characteristic of periodontal disease by multiple mechanisms including, for example, impaired recruitment and function of neutrophils after infection by pathogenic bacteria, diminished generation of collagen and exaggerated collagenolytic activity, genetic predisposition, and mechanisms that lead to an enhanced inflammatory response such as, for example, sustained signaling by RAGE. RAGE and its ligands are accumulated in multiple cell types in the diabetic gingiva in patients with gingivitis-periodontitis including the endothelium and infiltrating mononuclear phagocytes. A diabetic mouse model using streptozotocin to induce diabetes, followed by inoculation of mice with the human periodontal pathogen Porphyromonas gingivalis, can be used as a model of periodontal disease. Mice treated with a RAGE isoform, such as by once daily intraperitoneal injections immediately following inoculation with P. gingivalis for 2 months, can be observed for periodontal disease by assessing the degree of alveolar bone loss. Reduction of cytokines and matrix metalloproteinases, such as IL-6, TNF-α, MMP-2, 3, 9, which are implicated in the destruction on non-mineralized connective tissue and bone, also can be observed following treatment with a RAGE isoform compared to a vehicle control.

[0585] 4. Additional Angiogenesis-Related Treatments

[0586] CSR and ligand isoforms, including RTK isoforms such as VEGFR isoforms, for example, Fltl isoforms, and EphA isoforms also can be used to treat angiogenic and inflammatory-related conditions such as proliferation of synoviocytes, infiltration of inflammatory cells, inflammatory joint disease including cartilage destruction and pannus formation, such as are present in rheumatoid arthritis (RA). For example, an autoimmune model of collagen type-II induced arthritis, such as polyarticular arthritis induced in mice, can be used as a model for human RA. In such a model, mice can be treated with a CSR of ligand isoform, including but not limited to a HER2 isoform, FGFR isoform, VEGFR isoform, or other such isoform such as any described herein, such as by local injection of the protein or by gene therapy means. Following treatment, the mice can be observed for reduction of arthritic symptoms including paw swelling, erythema and ankylosis. Reduction in synovial angiogenesis and synovial inflammation also can be observed.

[0587] Other angiogenesis-related conditions amenable to treatment with VEGFR isoforms include hemangioma. One of the most frequent angiogenic diseases of childhood is hemangioma. In most cases, the tumors are benign and regress without intervention. In more severe cases, the tumors progress to large cavernous and infiltrative forms and create clinical complications. Systemic forms of hemangiomas, the hemangiomatoses, have a high mortality rate. Many cases of hemangiomas exist that cannot be treated or are difficult to treat with therapeutics currently in use.

[0588] VEGFR isoforms can be employed in the treatment of such diseases and conditions where angiogenesis is responsible for damage such as in Osler-Weber-Rendu disease, or hereditary hemorrhagic telangiectasia. This is an inherited disease characterized by multiple small angiomas, tumors of blood or lymph vessels. The angiomas are found in the skin and mucous membranes, often accompanied by epistaxis (nosebleeds) or gastrointestinal bleeding and sometimes with pulmonary or hepatic arteriovenous fistula. Diseases and disorders characterized by undesirable vascular permeability also can be treated by VEGFR isoforms. These include edema associated with brain tumors, ascites associated with malignancies, Meigs' syndrome, lung inflammation, nephrotic syndrome, pericardial effusion and pleural effusion.

[0589] Angiogenesis also is involved in normal physiological processes such as reproduction and wound healing. Angiogenesis is an important step in ovulation and also in implantation of the blastula after fertilization. Modulation of angiogenesis by VEGFR isoforms can be used to induce amenorrhea, to block ovulation or to prevent implantation by the blastula. VEGFR isoforms also can be used in surgical procedures. For example, in wound healing, excessive repair or fibroplasia can be a detrimental side effect of surgical procedures and may be caused or exacerbated by angiogenesis. Adhesions are a frequent complication of surgery and lead to problems such as small bowel obstruction.

[0590] PDGFR isoforms can be used in the regulation of neointima formation after arterial injury such as in arterial surgery. For example PDGFRB isoforms can be used to regulate PDGF-BB induced cell proliferation such as involved in neointima formation. PDGFR isoforms can be assessed for example, in a balloon-injured rooster femoral artery model. An adenovirus vector expressing a PDGFR isoform is constructed and transduced in vivo in the arterial model. Neointima-associated thrombosis is assessed in the transduced arteries to observe reduction compared with controls.

[0591] CSR and ligand isoforms useful in treatment of angiogenesis-related diseases and conditions also can be used in combination therapies such as with anti-angiogenesis drugs and molecules which interact with other signaling molecules in RTK-related pathways, including modulation of VEGFR ligands. For example, the known anti-rheumatic drug, bucillamine (BUC), was shown to include within its mechanism of action the inhibition of VEGF production by synovial cells. Anti-rheumatic effects of BUC are mediated by suppression of angiogenesis and synovial proliferation in the arthritic synovium through the inhibition of VEGF production by synovial cells. Combination therapy of such drugs with VEGFR isoforms can allow multiple mechanisms and sites of action for treatment.

[0592] 5. Cancers

[0593] RTK isoforms such as isoforms of EGFR, TIE/TEK, VEGFR and FGFR can be used in treatment of cancers. RTK isoforms including, but not limited to, EGFR RTK isoforms, such as ErbB2 and ErbB3 isoforms, VEGFR isoforms such as Flt1 isoforms, FGFR isoforms such as FGFR4 isoforms, and EphA1 isoforms can be used to treat cancer. Examples of cancer to be treated herein include, but are not limited to, carcinoma, lymphoma, blastoma, sarcoma, and leukemia or lymphoid malignancies. Additional examples of such cancers include squamous cell cancer (e.g. epithelial squamous cell cancer), lung cancer including small-cell lung cancer, non-small cell lung cancer, adenocarcinoma of the lung and squamous carcinoma of the lung, cancer of the peritoneum, hepatocellular cancer, gastric or stomach cancer including gastrointestinal cancer, pancreatic cancer, glioblastoma, cervical cancer, ovarian cancer, liver cancer, bladder cancer, hepatoma, breast cancer, colon cancer, rectal cancer, colorectal cancer, endometrial or uterine carcinoma, salivary gland carcinoma, kidney or renal cancer, prostate cancer, vulval cancer, thyroid cancer, hepatic carcinoma, anal carcinoma, penile carcinoma, as well as head and neck cancer. Combination therapies can be used with EGFR isoforms including anti-hormonal compounds, cardioprotectants, and anti-cancer agents such as chemotherapeutics and growth inhibitory agents.

[0594] Cancers treatable with EGFR isoforms generally are those that express an EGFR receptor or a receptor with which an EGF ligand interacts. Such cancers are known to those of skill in the art and/or can be identified by any means known in the art for detecting EGFR expression. An example of an ErbB2 expression diagnostic/prognostic assay available includes HERCEPTEST.RTM. (Dako). Paraffin embedded tissue sections from a tumor biopsy are subjected to the IHC assay and accorded an ErbB2 protein staining intensity criteria. Tumors accorded with less than a threshold score can be characterized as not overexpressing ErbB2, whereas those tumors with greater than or equal to a threshold score can be characterized as overexpressing ErbB2. In one example of treatment, ErbB2-overexpressing tumors are assessed as candidates for treatment with an EGFR isoform such as an ErbB2 isoform.

[0595] Isoforms provided herein can be used for treatment of cancers. For example, TIE/TEK isoforms can be used in the treatment of cancers such as by modulating tumor-related angiogenesis. Vascularization is involved in regulating cancer growth and spread.

[0596] For example, inhibition of angiogenesis and neovascularization inhibits solid tumor growth and expansion. TIE/TEK receptors such as Tie2 have been shown to influence vascular development in normal and cancerous tissues. TIE/TEK isoforms can be used as an inhibitor of tumor angiogenesis. A TIE/TEK isoform is produced such as by expression of the protein in cells. For example, secreted forms of TIE/TEK isoform can be expressed in cells and harvested from the media. Protein can be purified or partially-purified by biochemical means known in the art and by uses of antibody purification, such as antibodies raised against TIE/TEK isoform or a portion thereof or by use of a tagged TIE/TEK isoform and a corresponding antibody. Effects on angiogenesis can be monitored in an animal model such as by treating rat cornea with TIE/TEK isoform formulated as conditioned media in hydron pellets surgically implanted into a micropocket of a rat cornea or as or as purified protein (e.g. 100 μg/dose) administered to the window chamber. For example, rat models such as F344 rats with avascular corneas can be used in combination with tumor-cell conditioned media or by implanting a fragment of a tumor into the window chamber of an eye to induce angiogenesis. Corneas can be examined histologically to detect inhibition of angiogenesis induced by tumor-cell conditioned media. TIE/TEK isoforms also can be used to treat malignant and metastatic conditions such as solid tumors, including primary and metastatic sarcomas and carcinomas.

[0597] FGFR4 isoforms can be used to treat cancers, for example pituitary tumors.

[0598] Animal models can be used to mimic progression of human pituitary tumor progress. For example, an N-terminally shortened form of FGFR, ptd-FGFR4, expressed in transgenic mice recapitulates pituitary tumorigenesis (Ezzat et al. (2002) J. Clin. Invest. 109:69-78), including pituitary adenoma formation in the absence of prolonged and massive hyperplasia. FGFR4 isoforms can be administered to ptd-FGFR4 mice and the pituitary architecture and course of tumor progression compared with control mice.

[0599] 6. Alzheimer's Disease

[0600] CSR receptor or ligand isoforms, such as EGFR isoforms, also can be used to 30 treat inflammatory conditions and other conditions involving such responses, such as Alzheimer's disease and related conditions. A variety of mouse models are available for human Alzheimer's disease including transgenic mice overexpressing mutant amyloid precursor protein and mice expressing familial autosomal dominant-linked PS1 and mice expressing both proteins (PS1 M146L/APPK670N:M671L). Alzheimer's models are treated such as by injection of ErbB isoforms. Plaque development can be assessed such as by observation of neuritic plaques in the hippocampus, entorhinal cortex, and cerebral cortex, using staining and antibody immunoreactivity assays.

[0601] Other neurodegenerative diseases, such as Creutzfeldt-Jakob disease and Huntington's disease, can be treated with CSR or ligand isoforms. For example, RAGE and its ligands are accumulated in prion protein plaques in Creutzfeldt-Jakob disease and in the caudate nucleus in Huntington's disease. Treatment of neurodegenerative diseases with CSR or ligand isoforms, such as for example, RAGE isoforms can limit inflammation and disease associated with sustained RAGE signaling.

[0602] 7. Smooth Muscle Proliferative-Related Diseases and Conditions

[0603] CSR isoforms, including EGFR isoforms, such as ErbB isoforms, can be employed for the treatment of a variety of diseases and conditions involving smooth muscle cell proliferation in a mammal, such as a human. An example is treatment of cardiac diseases involving proliferation of vascular smooth muscle cells (VSMC) and leading to intimal hyperplasia such as vascular stenosis, restenosis resulting from angioplasty or surgery or stent implants, atherosclerosis and hypertension. In such conditions, an interplay of various cells and cytokines released act in autocrine, paracrine or juxtacrine manner, which result in migration of VSMCs from their normal location in media to the damaged intima. The migrated VSMCs proliferate excessively and lead to thickening of intima, which results in stenosis or occlusion of blood vessels. The problem is compounded by platelet aggregation and deposition at the site of lesion. Alpha-thrombin, a multifunctional serine protease, is concentrated at the site of vascular injury and stimulates VSMC proliferation. Following activation of this receptor, VSMCs produce and secrete various autocrine growth factors, including PDGF-AA, HB-EGF and TGF. EGFRs are involved in signal transduction cascades that ultimately result in migration and proliferation of fibroblasts and VSMCs, as well as stimulation of VSMCs to secrete various factors that are mitogenic for endothelial cells and induction of chemotactic response in endothelial cells. Treatment with EGFR isoforms can be used to modulate such signaling and responses.

[0604] EGFR isoforms such as ErbB2 and ErbB3 isoforms can be used to treat conditions where EGFRs such as ErbB2 and ErbB3 modulate bladder SMCs, such as bladder wall thickening that occurs in response to obstructive syndromes affecting the lower urinary tract. EGFR isoforms can be used in controlling proliferation of bladder smooth muscle cells, and consequently in the prevention or treatment of urinary obstructive syndromes.

[0605] EGFR isoforms can be used to treat obstructive airway diseases with underlying pathology involving smooth muscle cell proliferation. One example is asthma which manifests in airway inflammation and bronchoconstriction. EGF has been shown to stimulate proliferation of human airway SMCs and is likely to be one of the factors involved in the pathological proliferation of airway SMCs in obstructive airway diseases. EGFR isoforms can be used to modulate effects and responses to EGF by EGFRs.

[0606] 8. Inflammatory Diseases

[0607] CSR and ligand isoforms, such as TNFR isoforms or RAGE isoforms, can be used in the treatment of inflammatory diseases including central nervous system diseases (CNS), autoimmune diseases, airway hyper-responsiveness conditions such as in asthma, rheumatoid arthritis and inflammatory bowel disease.

[0608] TNF-α and lymphotoxin (LT) are proinflammatory cytokines and critical mediators in inflammatory responses in diseases and conditions such as multiple sclerosis. TNF-α and LT-α are produced by infiltrating lymphocytes and macrophages and additionally by activated CNS parenchymal cells, microglial cells and astrocytes. In MS patients, TNF-α is overproduced in serum and cerebrospinal fluid. In lesions, TNF-α and TNFR are extensively expressed. TNF-α and LT-α can induce selective toxicity of primary oligodendrocytes and induce myelin damage in CNS tissues. Thus, these two cytokines have been implicated in demyelination.

[0609] Experimental autoimmune encephalomyelitis (EAE) can serve as a model for multiple sclerosis (MS) (see for example, Probert et al. (2000) Brain 123: 2005-2019). EAE can be induced in a number of genetically susceptible species by immunization with myelin and myelin components such as myelin basic protein, proteolipid protein and myelin oligodendrocyte glycoprotein (MOG). For example, MOG-induced EAE recapitulates essential features of human MS including the chronic, relapsing clinical disease course, the pathohistological triad of inflammation, reactive gliosis, and the formation of large confluent demyelinated plaques. Additional MS models include transgenic mice overexpressing TNF-α, which model nonauto-immune mediated MS. Transgenic mice are engineered to express TNF-α locally in glial cells; human and murine TNF-α trigger MS-like symptoms. TNFR isoforms can be assessed in EAE animal models. Isoforms are administered, such as by injection, and the course and progression of symptoms is monitored compared to control animals.

[0610] Cytokines such as TNF α also are involved in airway smooth muscle contractile properties. TNFR1 and TNFR2 play a role in modulating biological affects in airway smooth muscle. TNFR2 modulates calcium homeostasis and thereby modulates airway smooth muscle hyper-responsiveness. TNFR1 modulates effects of TNF-α in airway smooth muscle. Airway smooth muscle response can be assessed in murine tracheal rings induced with carbachol. Effects, such as carbachol-induced contraction, in the presence and absence of TNF-α can be monitored. TNFR isoforms can be added to tracheal rings to assess the effects of isoforms on airway smooth muscle.

[0611] CSRs, including TNFRs and other CSRs, modulate inflammation in diseases such as rheumatoid arthritis (RA) (Edwards et al. (2003) Adv Drug Deliv. Rev. 55(10):1315-36). TNFR isoforms, including TNFR1 or TNFR2 isoforms, can be used to treat RA. For example, TNFR isoforms can be injected locally or systemically. Isoforms can be dosed daily or weekly. Pegylated TNFR isoforms can be used to reduce immunogenicity. Primate models are available for RA treatments. Response of tender and swollen joints can be monitored in subjects treated with TNFR isoforms and controls to assess TNFR isoform treatment.

[0612] 9. Cardiovascular Disease

[0613] CSR or ligand isoforms, including for example, RAGE isoforms, can be used in treatment of cardiovascular disease. RAGE and its ligands accumulate in ageing tissues including in the ageing human heart leading to sustained and chronic RAGE-mediated signaling. For example, RAGE signaling can mediate regulation of cell-matrix interactions through the activation of matrix metalloproteinases that has been observed, wfor example, in cardiac fibroblasts associated with cardiac fibrosis. Conversely, decreased levels of a soluble RAGE isoform in the plasma of patients with coronary artery disease, but not in control subjects, correlates with prognosis of athereosclerosis and vascular inflammation associated with coronary artery disease. Treatment of patients with cardiovascular disease and related conditions with RAGE isoforms may exert antiatherogenic effects by preventing ligand-mediated RAGE-dependent cellular activation.

[0614] 10. Kidney Disease

[0615] CSR and ligand isoforms, including RAGE isoforms, can be used in treatment of chronic kidney disease. Kidney disease is characterized by chronic inflammation and elevated blood levels of proinflammatory cytokines such as TNF-α, IL-1′, and AGE, a ligand for RAGE. RAGE also is accumulated on peripheral blood monocytes from patients with chronic kidney disease, increasing as renal function deteriorates. RAGE/RAGE ligand signaling is associated with the chronic monocyte-mediated systemic inflammation associated with chronic kidney disease. Treatment with RAGE isoforms can diminish binding of RAGE ligands to cell surface RAGE and attenuate RAGE-mediated signaling such as the production of proinflammatory cytokines like TNF-α.

J. Combination Therapies

[0616] CSR or ligand isoforms, particularly those provided herein that are modified to include additional amino acids at their N-terminus following expression or secretion, can be used in combination with each other, with other cell surface receptor or ligand isoforms, such as a herstatin or any described, for example, in U.S. application Ser. Nos. 09/942,959, 09/234,208, 09/506,079; U.S. Provisional Application Ser. Nos. 60/571,289, 60/580,990 and 60/666,825; and U.S. Pat. No. 6,414,130, published International PCT application No WO 00/44403, WO 1/61356, WO 2005/016966, including but not limited to, those set forth in any of SEQ ID Nos. 32, 34, 36, 38, 40, 42, 44, 46, 48, 140, 142, 143, 145, 147, 149, 150, 152, 153, 155, 157, 159, 161-168, 170, 172, 174, 176, 178, 180, 181, 183, 185, 186, 188, 190, 192, 194, 196, 198, 200, 202, 204, 206, 208, 210, 212, 214, 216, 217, 219, 221, 223, 225, 227, 229, 230-233, 225, 237, 239, 241, 243, 245, 247, 248-251, 253, 255, 257, 259, 261, 263, 264-270, 272, 274-280, 282, 284, 286, 288, 289-303, or 319-333); and/or with other existing drugs and therapeutics to treat diseases and conditions, particularly those involving aberrant angiogenesis and/or neovascularization, including, but not limited to, cancers and other proliferative disorders, inflammatory diseases and autoimmune disorders, as set forth herein and known to those of skill in the art.

[0617] For example, as described herein a number of isoforms can be used to treat angiogenesis-related conditions and diseases and/or control tumor proliferation. Such treatments can be performed in conjunction with anti-angiogenic and/or anti-tumorigenic drugs and/or therapeutics. Examples of anti-angiogenic and anti-tumorigenic drugs and therapies useful for combination therapies include tyrosine kinase inhibitors and molecules capable of modulating tyrosine kinase signal transduction and can be used in combination therapies including, but not limited to, 4-aminopyrrolo[2,3-d]pyrimidines (see for example, U.S. Pat. No. 5,639,757), and quinazoline compounds and compositions (e.g., U.S. Pat. No. 5,792,771. Other compounds useful in combination therapies include steroids such as the angiostatic 4,9(11)-steroids and C21-oxygenated steroids, angiostatin, endostatin, vasculostatin, canstatin and maspin, angiopoietins, bacterial polysaccharide CM101 and the antibody LM609 (U.S. Pat. No. 5,753,230), thrombospondin (TSP-1), platelet factor 4 (PF4), interferons, metalloproteinase inhibitors, pharmacological agents including AGM-1470/TNP-470, thalidomide, and carboxyamidotriazole (CAI), cortisone such as in the presence of heparin or heparin fragments, anti-Invasive Factor, retinoic acids and paclitaxel (U.S. Pat. No. 5,716,981; incorporated herein by reference), shark cartilage extract, anionic polyamide or polyurea oligomers, oxindole derivatives, estradiol derivatives and thiazolopyrimidine derivatives.

[0618] In another example, a CSR or ligand isoform, such as a VEGF isoform, can be administered with an agent for treatment of diabetes. Such agents include agents for the treatment of any or all conditions such as diabetic periodontal disease, diabetic vascular disease, tubulointerstitial disease and diabetic neuropathy. In another example, a CSR isoform is administered with an agent that treats cancers such as an anti-cancer agent, a chemotherapeutic agent, and growth inhibitory agent, including coadministration of cocktails of different chemotherapeutic agents. Examples of chemotherapeutic agents include taxanes (such as paclitaxel and doxetaxel) and anthracycline antibiotics. Preparation and dosing schedules for such chemotherapeutic agents may be used according to manufacturers' instructions or as determined empirically by the skilled practitioner. Preparation and dosing schedules for such chemotherapy also are described in Chemotherapy Service Ed., M. C. Perry, Williams & Wilkins, Baltimore, Md. (1992). Examples of cancers to be treated include squamous cell cancer (e.g. epithelial squamous cell cancer), lung cancer including small-cell lung cancer, non-small cell lung cancer, adenocarcinoma of the lung and squamous carcinoma of the lung, cancer of the peritoneum, hepatocellular cancer, gastric or stomach cancer including gastrointestinal cancer, pancreatic cancer, glioblastoma, cervical cancer, ovarian cancer, liver cancer, bladder cancer, hepatoma, breast cancer, colon cancer, rectal cancer, colorectal cancer, endometrial or uterine carcinoma, salivary gland carcinoma, kidney or renal cancer, prostate cancer, vulval cancer, thyroid cancer, hepatic carcinoma, anal carcinoma, penile carcinoma, as well as head and neck cancer. Any of the CSR isoforms can be administered in combination with two or more agents for treatment of a disease or a condition.

[0619] Additional compounds can be used in combination therapy with CSR or ligand isoforms. Anti-hormonal compounds can be used in combination therapies, such as with EGFR isoforms. Examples of such compounds include an anti-estrogen compound such as tamoxifen; an anti-progesterone such as onapristone and an anti-androgen such as flutamide, in dosages known for such molecules. It also can be beneficial to also coadminister a cardioprotectant (to prevent or reduce myocardial dysfunction that can be associated with therapy) or one or more cytokines. In addition to the above therapeutic regimes, the patient may be subjected to surgical removal of cancer cells and/or radiation therapy.

[0620] Combinations of CSR or ligand isoforms, particularly those provided herein including modified forms of isoforms containing one or more additional amino acids at their N-terminus, with one or more different CSR or ligand isoforms including with herstatins and other agents, can be used for treating cancers and other disorders involving aberrant angiogenesis (see, e.g. copending and published applications U.S. application Ser. Nos. 09/942,959, 09/234,208, 09/506,079; U.S. Provisional Application Ser. Nos. 60/571,289, 60/580,990 and 60/666,825; and U.S. Pat. No. 6,414,130, published International PCT application No WO 00/44403, WO 01/61356, WO 2005/016966) are provided. The cell surface receptors include receptor tyrosine kinases, such as members of the VEGFR, FGFR, PDGFR (including Rα, Rβ, CSF1R, Kit), MET (including c-Met, c-RON), TIE and EPHA families. These can include ErbB2 (HER-2), ErbB3, ErbB4, EGFR, DDR1, DDR2, EphA1, EphB1, FGFR-2, FGFR-3, FGFR-4, MET, PDGFR-A, TEK, Tie-1, KIT, VEGFR-1, VEGFR-2, VEGFR-3, Flt1, Flt3, RON, or CSFIR, TNFR1, TNFR2, RON, CSFR1 and others. The cell surface receptors also can include isoforms of TNFRs or RAGE. Ligand isoforms also can be used in combination including HGF isoforms. Exemplary of such isoforms are the herstatins (see, SEQ ID NOS:290-303 and encoding nucleic acid sequences set forth in SEQ ID NOS:304-318), polypeptides that include the intron portion of a herstatin (see, SEQ ID NOS: 319-333 and encoding nucleic acid sequences set forth in SEQ ID NOS: 334-348), as well as any isoforms provided herein. The combinations of isoforms and/or drug agent selected is a function of the disease to be treated and is based upon consideration of the target tissues and cells and receptors expressed thereon.

[0621] The combinations, for example, can target two or more cell surface receptors or steps in the angiogenic and/or endothelial cell maintenance pathways or can target two or more cell surface receptors or steps in a disease process, such as any in which one or both of these pathways are implicated, such as inflammatory diseases, tumors and all other noted herein and known to those of skill in the art. The two or more agents can be administered as a single composition or can be administered as two or more compositions (where there are more than two agents) simultaneously, intermittently or sequentially. They can be packaged as a kit that contains two or more compositions separately or as a combined composition and optionally with instructions for administration and/or devices for administration, such as syringes.

[0622] Adjuvants and other immune modulators can be used in combination with CSR isoforms in treating cancers, for example to increase immune response to tumor cells. Combination therapy can increase the effectiveness of treatments and in some cases, create synergistic effects such that the combination is more effective than the additive effect of the treatments separately. Examples of adjuvants include, but are not limited to, bacterial DNA, nucleic acid fraction of attenuated mycobacterial cells (BCG; Bacillus-Calmette-Guerin), synthetic oligonucleotides from the BCG genome, and synthetic oligonucleotides containing CpG motifs (CpG ODN; Wooldridge et al. (1997) Blood 89:2994-2998), levamisole, aluminum hydroxide (alum), BCG, Incomplete Freud's Adjuvant (IFA), QS-21 (a plant derived immunostimulant), keyhole limpet hemocyanin (KLH), and dinitrophenyl (DNP). Examples of immune modulators include but are not limited to, cytokines such as interleukins (e.g., IL-2, IL-3, IL-4, IL-5, IL-6, IL-7, IL-9, IL-10, IL-11, IL-12, IL-13, IL-15, IL-16, IL-17, IL-18, IL-1α, IL-1β, and IL-1 RA), granulocyte colony stimulating factor (G-CSF), granulocyte-macrophage colony stimulating factor (GM-CSF), oncostatin M, erythropoietin, leukemia inhibitory factor (LIF), interferons, B7.1 (also known as CD80), B7.2 (also known as B70, CD86), TNF family members (TNF-α, TNF-β, LT-β, CD40 ligand, Fas ligand, CD27 ligand, CD30 ligand, 4-1BBL, Trail), and MIF, interferon, cytokines such as IL-2 and IL-12; and chemotherapy agents such as methotrexate and chlorambucil.

[0623] Preclinical Studies

[0624] Model animal studies can be used in preclinical evaluation of RTK isoforms that are candidate therapeutics. Parameters that can be assessed include, but are not limited to efficacy and concentration-response, safety, pharmnacokinetics, interspecies scaling and tissue distribution. Model animal studies include assays such as described herein as well as those known to one of skill in the art. Animal models can be used to obtain data that then can be extrapolated to human dosages for design of clinical trials and treatments with RTK isoforms. For example, efficacy and concentration-response VEGFR inhibitors in tumor-bearing mice can be extrapolated to human treatment (Mordenti et al., (1999) Toxicol Pathol. Jan-Feb; 27(1):14-21) in order to define clinical dosing regimens effective to maintain a therapeutic inhibitor, such as an antibody against VEGFR for human use in the required efficacious range. Similar models and dose studies can be applied to VEGFR isoform dosage determination and translated into appropriate human doses, as well as other techniques known to the skilled artisan. Preclinical safety studies and preclinical pharmacokinetics can be performed, for example in monkeys, mice, rats and rabbits. Pharmacokinetic data from mice, rats and monkeys has been used to predict the pharmacokinetics of the counterpart therapeutic in humans using allometric scaling. Accordingly, appropriate dosage information can be determined for the treatment of human pathological conditions, including rheumatoid arthritis, ocular neovascularization and cancer. A humanized version of the anti-VEGF antibody has been employed in clinical trials as an anti-cancer agent (Brem, (1998) Cancer Res. 58(13):2784-92; Presta et al., (1997) Cancer Res. 57(20):4593-9) and such clinical data also can be considered as a reference source when designing therapeutic doses for VEGFR isoforms.

### K EXAMPLES

[0625] The following examples are included for illustrative purposes only and are not intended to limit the scope of the invention.

### Example 1

### Method for Cloning CSR Isoforms

A. Preparation of Messenger RNA

[0626] MRNA isolated from major human tissue types from healthy or diseased tissues or cell lines were purchased from Clontech (BD Biosciences, Clontech, Palo Alto, Calif.) and Stratagene (La Jolla, Calif.). Equal amounts of mRNA were pooled and used as templates for reverse transcription-based PCR amplification (RT-PCR).

B. cDNA Synthesis

[0627] MRNA was denatured at 70° C. in the presence of 40% DMSO for 10 min and quenched on ice. First-strand cDNA was synthesized with either 200 ng oligo(dT) or 20 ng random hexamers in a 20 μl reaction containing 10% DMSO, 50 mM Tris-HCl (pH 8.3), 75 mM KCl, 3 mM MgCl₂, 10 mM DTT, 2 mM each dNTP, 5 μg mRNA, and 200 units of Stratascript reverse transcriptase (Stratagene, La Jolla, Calif.). After incubation at 37° C. for 1 h, the cDNA from both reactions were pooled and treated with 10 units of RNase H (Promega, Madison, Wis.).

C. PCR Amplification

[0628] Gene-specific PCR primers specific to a cell surface receptor (see e.g., Table 8 for exemplary cell surface receptors) were selected using the Oligo 6.6 software (Molecular Biology Insights, Inc., Cascade, Colo.) and synthesized by Qiagen-Operon (Richmond, Calif.). The forward primers (see e.g., Table 9) flank the start codon. The reverse primers flank the stop codon or were chosen from regions at least 1.5 kb downstream from the start codon (see Table 9). Each PCR reaction contained 10 ng of reverse-transcribed cDNA, 0.025 U/μl TaqPlus (Stratagene), 0.0035 U/μl PfuTurbo (Stratagene), 0.2 mM dNTP (Amersham, Piscataway, N.J.), and 0.2 μM forward and reverse primers in a total volume of 50 μl. PCR conditions were 35 cycles and 94.5° C. for 45 s, 58° C. for 50 s, and 72° C. for 5 min. The reaction was terminated with an elongation step of 72° C. for 10 min.

TABLE 8
LIST OF GENES FOR CLONING CSR Isoforms

| | | | | | | | SEQ |
|---|---|---|---|---|---|---|---|
| | | | Catalytic | SEQ ID | | | ID |
| Family | Member | nt ACC. # | Domain | NO: | ORF | prt ACC.# | NO: |
| DDR | DDR1 | NM_013993 | 2149-3057 | 355 | 337- | NP_054699 | 392 |
| | | | | | 3078 | | |
| | DDR2 | NM_006182 | 2022-2900 | 356 | 354- | NP_006173 | 393 |
| | | | | | 2921 | | |
| EPH | EPHA1 | NM-005232 | 1939-2736 | 357 | 88-3018 | NP_005223 | 394 |
| | EPHA2 | NM-004431 | 1956-2759 | 358 | 138- | NP_004422 | 395 |
| | | | | | 3068 | | |
| | EPHA3 | NM-005233 | 2086-2859 | 359 | 226- | NP_005224 | 396 |
| | | | | | 3177 | | |
| | EPHA4 | NM_004438 | 1885-2685 | 360 | 43-3003 | NP_004429 | 397 |
| | EPHA5 | L36644 | 1259-1460 | 361 | 1-2976 | AAA74245 | 398 |
| | EPHA6 | AL133666 | 691-1332 | 362 | 343- | CAB63775 | 399 |
| | | | | | 1347 | | |
| | EPHA7 | NM_004440 | 2092-2892 | 363 | 214- | NP_004431 | 400 |
| | | | | | 3210 | | |
| | EPHA8 | NM_020526 | 2028-2801 | 364 | 126- | NP_065387 | 401 |
| | | | | | 3143 | | |
| | EPHB1 | NM_004441 | 2051-2857 | 365 | 215- | NP_004432 | 402 |
| | | | | | 3169 | | |
| | EPHB2 | AF025304 | 1886-2681 | 366 | 26-3193 | AAB94602 | 403 |
| | EPHB3 | NM_004443 | 2316-3122 | 367 | 438- | NP_004434 | 404 |
| | | | | | 3434 | | |
| | EPHB4 | NM_004444 | 2200-3006 | 368 | 376- | NP_004435 | 405 |
| | | | | | 3339 | | |
| | EPHB6 | NM_004445 | 2761-3498 | 369 | 799- | NP_004436 | 406 |
| | | | | | 3819 | | |
| ERB | EGFR | NM_005228 | 2380-3148 | 370 | 247- | NP_005219 | 407 |
| | | | | | 3879 | | |
| | ERBB2 | NM_004448 | 2396-3164 | 371 | 239- | NP_004439 | 408 |
| | | | | | 4006 | | |
| | ERBB3 | NM_001982 | 2318-3086 | 372 | 194- | NP_001973 | 409 |
| | | | | | 4222 | | |
| FGFR | FGFR1 | M34641 | 1435-2263 | 373 | 10-2472 | AAA35835 | 410 |
| | FGFR2 | NM_000141 | 2009-2872 | 374 | 593- | NP_000132 | 411 |
| | | | | | 3058 | | |
| | FGFR3 | NM_000142 | 1429-2292 | 375 | 40-2460 | NP_000133 | 412 |
| | FGFR4 | NM_002011 | 1534-2394 | 376 | 157- | NP_002002 | 413 |
| | | | | | 2565 | | |
| MET | MET | NM_000245 | 3419-4198 | 377 | 188- | NP_000236 | 414 |
| | | | | | 4360 | | |
| | RON | NM_002447 | 3242-4260 | 378 | 29-4231 | NP_002438 | 415 |
| PDGFR | CSF1R | NM_005211 | 2012-3208 | 379 | 293- | NP_005202 | 416 |
| | | | | | 3211 | | |
| | FLT3 | NM_004119 | 1861-2886 | 380 | 58-3039 | NP_004110 | 417 |
| | KIT | NM_000222 | 1762-2799 | 381 | 22-2952 | NP_000213 | 418 |
| | PDGFRA | NM_006206 | 2147-3253 | 382 | 395- | NP_006197 | 419 |
| | | | | | 3664 | | |
| | PDGFRB | NM_002609 | 2133-3215 | 383 | 357- | NP_002600 | 420 |
| | | | | | 3677 | | |
| RAGE | RAGE | NM_001136 | | 384 | 25-1239 | NP_001127 | 421 |
| TEK | TEK | NM_000459 | 2603-3433 | 385 | 149- | NP_000450 | 422 |
| | | | | | 3523 | | |
| | TIE | NM_005424 | 2579-3409 | 386 | 80-3496 | NP_005415 | 423 |
| TNFR | TNFR1 | NM_001065 | 1323- | 387 | 282- | NP_001056 | 424 |
| | | | 1598(DD) | | 1649 | | |
| | TNFR2 | NM_001066 | n/a | 388 | 90-1475 | NP_001057 | 425 |
| VEGFR | VEGFR1 | NM_002019 | 2704-3702 | 389 | 250- | NP_002010 | 426 |
| | | | | | 4266 | | |
| | VEGFR2 | NM_002253 | 2779-3792 | 390 | 304- | NP_002244 | 427 |
| | | | | | 4374 | | |
| | VEGFR3 | NM_002020 | 2530-3525 | 391 | 22-3918 | NP_002011 | 428 |
| HGF | HGF | NM_000601 | | 460 | 166- | NP_000592 | 461 |
| | | | | | 2352 | | |

[0629] TABLE 9
PRIMERS FOR PCR CLONING.

| SEQ | | |
|---|---|---|
| ID | | |
| NO | Primer | Sequence |
| 463 | CSF1R_F1 | CTG CCA CTT CCC CAC CGA GG |
| 464 | DDR1_F1 | GGG ATC AGG AGC TAT GGG ACC A |
| 465 | DDR2_F1 | CTG AGA TGA TCC TGA TTC CCA GAA |
| 466 | EPHA1_F1 | GGA GCT ATG GAG CGG CGC TG |
| 467 | EPHA2_F1 | AGC GAG AAG CGC GGC ATG GA |
| 468 | EPHA3_F1 | CAC CAG CAA CAT GGA TTG TCA GC |
| 469 | EPHA4_F1 | CGA ACC ATG GCT GGG ATT TTC TA |
| 470 | EPHA7_F1 | ATA AAA CCT GCT CAT GCA CCA TG |
| 471 | EPHB1_F1 | GCG ATG GCC CTG GAT TAT CTA |
| 472 | EPHB2_F1 | CCC CGG GAA GCG CAG CCA |
| 473 | EPHB3_F1 | GCT CCT AGA GCT GCC ACG GC |
| 474 | EPHB4_F1 | GAT CCT ACC CGA GTG AGG CGG |
| 475 | CSF1R_R1 | GGG CTC CTG CAG AGA TGG GTA |
| 476 | DDR1_R1 | AGA GCC ATT GGG GAC ACA GGG A |
| 477 | DDR2_R1 | AGC CTG ACT CCT CCT CCC CTG |
| 478 | EPHA1_R1 | AGC TCT GTC AGC AAG ACC CTG G |
| 479 | EPHA2_R1 | AGG TGG TGT CTG GGG CCA GGT C |
| 480 | EPHA3_R1 | GTC AGG CTT GAG GCT ACT GAT GG |
| 481 | EPHA4_R1 | AAC ATA GGA AGT GAG AGG GTT CAG |
| | | G |
| 482 | EPHA7_R1 | ACT CCA TTG GGA TGC TCT GGT TC |
| 483 | EPHB1_R1 | AGC CCA TCA ATC CTT GCT GTG |
| 484 | EPHB2_R1 | GCG TGC CCG CAC CTG GAA GA |
| 485 | EPHB3_R1 | GCT GGT CAC TGT GGA GGC GA |
| 486 | EPHB4_R1 | GGT AGC TGG CTC CCC GCT TCA |
| 487 | CSF1R_R2 | CCG AGG GTC TTA CCA AAC TGC |
| 488 | DDR1_R2 | AAG CGG AGT CGA GAT CGA GGG A |
| 489 | DDR2_R2 | GGG GAA CTC CTC CAC AGC CA |
| 490 | EPHA1_R2 | CGG GTA AAG TCC AAG GCT CCC |
| 491 | EPHA2_R2 | GAC ACA GGA TGG ATG GAT CTC GG |
| 492 | EPHA3_R2 | ATC AAT GGA TAT GTT GGT GGC ATC |
| 493 | EPHA4_R2 | AGG ATG CGT CAA TTT CTT TGG CA |
| 494 | EPHA7_R2 | CTG CAC CAA TCA CAC GCT CAA |
| 495 | EPHB1_R2 | ATC AAT CTC CTT GGC AAA CTC C |
| 496 | EPHB2_R2 | GCC CAT GAT GGA GGC TTC GC |
| 497 | EPHB3_R2 | ACG CAG GAC ACG TCG ATC TCC |
| 498 | EPHB4_R2 | ACC TGC ACC AAT CAC CTC TTC AA |
| 499 | EPHB6_F1 | AGA GTG GCG GGC ATG GTG TG |
| 500 | EPHB6_R1 | GCG GAG CTG ATA GTC CAG GAT G |
| 501 | EPHB6_R2 | CCT GTC CCA ATG ACC TCC TCA A |
| 502 | EPHA6_F1 | GGA GAT GAA AGA CTC TCC ATT TCA |
| | | AG |
| 503 | FGFR1_F1 | ATT CGG GAT GTG GAG CTG GA |
| 504 | FGFR2_F1 | AGG ACC GGG GAT TGG TAC CG |
| 505 | FGFR3_F1 | CAT GGG CGC CCC TGC CTG |
| 506 | FGFR4_F1 | AGA AGG AGA TGC GGC TGC TG |
| 507 | TNFR1A(p55)_F1 | AGC TGT CTG GCA TGG GCC TCT C |
| 508 | TNFR1B(p55)_F1 | ACC GGA CCC CGC CCG CAC |
| 509 | EPHA6_R1 | ATCT TAG ACC GAC AGA AAA TTT |
| | | GGC |
| 510 | FGFR1_R1 | CAA GGG ACC ATC CTG CGT GC |
| 511 | FGFR2_R1 | AGG GGC TTG CCC AGT GTC AG |
| 512 | FGFR3_R1 | GCT CCC ATT TGG GGT CGG CA |
| 513 | FGFR4_R1 | CGG GGG AAC TCC CAT AGT GG |
| 514 | TNFR1A(p55)_R1 | GGC GCA GCC TCA TCT GAG AAG A |
| 515 | TNFR1B(p55)_R1 | CAC AGC CCA CAC CGG CCT GG |
| 516 | FLT3_F1 | GGA GGC CAT GCC GGC GTT G |
| 517 | KIT-F1 | CGC AGC TAC CGC GAT GAG AGG |
| 518 | MET_F1 | CTC ATA ATG AAG GCC CCC GC |
| 519 | PDGFRA_F1 | AAG TTT CCC AGA GCT ATG GGG A |
| 520 | PDGFRB_F1 | AGC AGC AAG GAC ACC ATG CG |
| 521 | RON_F1 | GGT CCC AGC TCG CCT CGA TG |
| 522 | TEK_F1 | AGA TTT GGG GAA GCA TGG ACT C |
| 523 | TIE_F1 | CGG CCT CTG GAG TAT GGT CTG |
| 524 | VEGFR1_F1 | CAT GGT CAG CTA CTG GGA CAC C |
| 525 | VEGFR2_F1 | AGG TGC AGG ATG CAG AGC AAG |
| 526 | VEGFR3_F1 | AGC GGC CGG AGA TGC AGC G |
| 527 | FLT3_R1 | CTG CTC GAC ACC CAC TGT CCA |
| 528 | KIT-R1 | GCA GAA GTC TTG CCC ACA TCG |
| 529 | MET_R1 | CTT CGT GAT CTT CTT CCC AGT GA |
| 530 | PDGFRA_R1 | AGA TTC TTA GCC AGG CAT CGC A |
| 531 | PDGFRB_R1 | AGC GCA CCG ACA GTG GCC GA |
| 532 | RON_R1 | GCA CGG GCT GCC CAC TGT CA |
| 533 | TEK_R1 | CTG TCC GAG GTT CCA AAT AGT TGA |
| 534 | TIE_R1 | CGT TCT CAC TGG GGT CCA CCA |
| 535 | VEGFR1_R1 | ATT ATT GCC ATG CGC TGA GTG A |
| 536 | VEOFR1_R1 | GCC GCT TGG ATA ACA AGG GTA |
| 537 | VEGFR3_R1 | AAC TCG GTC CAG GTG TCC AGG C |
| 538 | FLT3_R2 | CTT GGA AAC TCC CAT TTG AGA TCA |
| 539 | KIT-R2 | ACA ACC TTC CCG AAA GCT CCA |
| 540 | MET_R2 | ACT ACA TGC TGC ACT GCC TGG A |
| 541 | PDGFRA_R2 | CCC GAC CAA GCA CTA GTC CAT C |
| 542 | PDGFRB_R2 | CCA GAG CCG AGG GTG CGT CC |
| 543 | RON_R2 | CAG GTC ATT CAG GTT GGG AGG A |
| 544 | TEK_R2 | ATT TGA TGT CAT TCC AGT CAA GCA |
| 545 | TIE_R2 | AGC ACT GGG TAG CTC AGG GGC |
| 546 | VEGFR1_R2 | AAC TCC CAC TTG CTG GCA TCA |
| 547 | VEGFR2_R2 | AAT TCC CAT TTG CTG GCA TCA |
| 548 | VEGFR3_R2 | ATT CCC ACT GGC TGG CAT CGT A |
| 549 | RAGE_Fu | CAG GAC CCT GGA AGG AAG CA |
| 550 | RAGE_F1 | AGG ATG GCA GCC GGA ACA G |
| 551 | RAGE_f1R1 | CCC CTC AAG GCC CTC CAG TA |
| 552 | RAGE_Intron3R1 | GGA AGT CAG AGG CCC TCA TGG |
| 553 | RAGE_Intron4R1 | GGG AAA GAG TGG TGA CCT CAG A |
| 554 | RAGE_Intron5R1 | CTT GGG GGG CAC CTT AGG ACT C |
| 555 | RAGE_Intron6R1 | ACT CCC TCT TTC CCT AAG GGT CA |
| 556 | RAGE_Intron7R1 | GTT ATG GTT CAC CCT ACC TCC CA |
| 557 | RAGE_Intron8R1 | ATTT AGC TCA GAG GGA AGA AGG GA |
| 558 | HGF_F1 | AGG ATT CTT TCA CCC AGG CA |
| 559 | HGF_intron11R1 | GAA TAA ATG CCA GAC CAC CTA |
| 560 | HGF_F2 | ACC ATG TGG GTG ACC AAA CT |
| 561 | HGF_intron11R2 | TCA CAA GAC ACC AAT CCC TAA CT |
| 562 | HGF_intron13R1 | TCC ATA TTT CTG GGA ATA GGA GGA |
| | | C |

D. Cloning and Sequencing of PCR Products

[0630] PCR products were electrophoresed on a 1% agarose gel, and DNA from detectable bands was stained with Gelstar (BioWhitaker Molecular Application, Walkersville, Md.). The DNA bands were extracted with the QiaQuick gel extraction kit (Qiagen, Valencia, Calif.), ligated into the pDrive UA-cloning vector (Qiagen), and transformed into Escherichia coli. Recombinant plasmids were selected on LB agar plates containing 100 μg/ml carbenicillin. For each transfection, 192 colonies were randomly picked and their cDNA insert sizes were determined by PCR with M13 forward and reverse vector primers. Representative clones from PCR products with distinguishable molecular masses as visualized by fluorescence imaging (Alpha Innotech, San Leandro, Calif.) were then sequenced from both directions with vector primers (M13 forward and reverse). All clones were sequenced entirely using custom primers for directed sequencing completion across gapped regions.

E. Sequence Analysis

[0631] Computational analysis of alternative splicing was performed by alignment of each cDNA sequence to its respective genomic sequence using SIM4 (a computer program for analysis of splice variants). Only transcripts with canonical (e.g. GT-AG) donor-acceptor splicing sites were considered for analysis. Clones encoding CSR isoforms were studied further (see below, Table 10).

F. Exemplary CSR Isoforms

[0632] Exemplary CSR isoforms, prepared using the methods described herein, are set forth below in Table 10. Nucleic acid molecules encoding CSR isoforms are provided and include those that contain sequences of nucleotides or ribonucleotides or nucleotide or ribonuculeotide analogs. SEQ ID NOS for exemplary nucleic acid and amino acid sequences of exemplary CSR isoform polypeptides are depicted in Table 10.

TABLE 10
CSR Isoforms

| | | | | SEQ ID | SEQ ID |
|---|---|---|---|---|---|
| | | | | NO | NO |
| Gene | ID | Type | Length | (nucleotide) | (amino acid) |
| DDR1 | SR005_A11 | Exon deletion | 286 aa | 139 | 140 |
| DDR1 | SR005_A10 | Exon deletion | 243 aa | 141 | 142 |
| EPHA1 | SR004_G03 | Intron fusion | 474 aa | 144 | 145 |
| EPHA1 | SR004_G07 | Intron fusion, exon | 311 aa | 146 | 147 |
| | | deletion | | | |
| EPHA1 | SR004_H03 | Intron fusion | 490 aa | 148 | 149 |
| EPHA2 | SR016_E12 | Intron fusion | 497 aa | 151 | 152 |
| EPHB1 | SR005_D06 | Exon shorten | 242 aa | 154 | 155 |
| EPHB4 | SR012_C08 | Exon deletion | 306 aa | 156 | 157 |
| EPHB4 | SR012_D11 | Exon shorten | 516 aa | 158 | 159 |
| EPHB4 | SR012_E11 | Exon shorted | 414 aa | 160 | 161 |
| FGFR1 | SR001_E12 | Exon deletions | 228 aa | 169 | 170 |
| FGFR1 | SR022_C02 | Exon deletion, intron | 320 aa | 171 | 172 |
| | | fusion | | | |
| FGFR2 | SR022_C10 | Intron fusion | 266 aa | 173 | 174 |
| FGFR2 | SR022_C11 | Intron fusion | 317 aa | 175 | 176 |
| FGFR2 | SR022_D04 | Exon deletion, intron | 281 aa | 177 | 178 |
| | | fusion | | | |
| FGFR2 | SR022_D06 | Intron fusion | 396 aa | 179 | 180 |
| FGFR4 | SR002_A11 | Intron fusion | 72 aa | 182 | 183 |
| FGFR4 | SR002_A10 | Intron fusion | 446 aa | 184 | 185 |
| MET | SR020_C10 | Intron fusion | 413 aa | 187 | 188 |
| MET | SR020_C12 | Intron fusion | 468 aa | 189 | 190 |
| MET | SR020_D04 | Intron fusion | 518 aa | 191 | 192 |
| MET | SR020_D07 | Intron fusion | 596 aa | 193 | 194 |
| MET | SR020_D11 | Intron fusion | 408 aa | 195 | 196 |
| MET | SR020_E11 | Intron fusion | 621 aa | 197 | 198 |
| MET | SR020_F08 | Intron fusion | 664 aa | 199 | 200 |
| MET | SR020_F11 | Intron fusion | 719 aa | 201 | 202 |
| MET | SR020_F12 | Intron fusion | 697 aa | 203 | 204 |
| MET | SR020_G03 | Exon shorten, intron | 691 aa | 205 | 206 |
| | | fusion | | | |
| MET | SR020_G07 | Intron fusion | 661 aa | 207 | 208 |
| MET | SR020_H03 | Intron fusion | 755 aa | 209 | 210 |
| MET | SR020_H06 | Intron fusion | 823 aa | 211 | 212 |
| MET | SR020_H07 | Intron fusion | 877 aa | 213 | 214 |
| MET | SR020_H08 | Exon deletion, intron | 764 aa | 215 | 216 |
| | | fusion | | | |
| RON | SR004_C11 | Intron fusion | 495 aa | 218 | 219 |
| RON | SR014_C01 | Intron fusion | 541 aa | 220 | 221 |
| RON | SR014_C09 | Intron fusion | 908 aa | 222 | 223 |
| RON | SR014_E12 | Intron fusion | 647 aa | 224 | 225 |
| CSF1R | SR005_A06 | Exon deletion | 306 aa | 226 | 227 |
| KIT | SR002_H01 | Intron fusion | 413 aa | 228 | 229 |
| PDGFRB | SR007_C09 | Exon shorten (4 bp) | 336 aa | 232 | 233 |
| RAGE | SR021A05 | Intron fusion | 146 | 234 | 235 |
| RAGE | SR021C02 | Intron fusion | 266 | 236 | 237 |
| RAGE | SR021C06 | Intron fusion | 387 | 238 | 239 |
| RAGE | SR021C08 | Intron fusion | 173 | 240 | 241 |
| RAGE | SR021F06 | Intron fusion | 172 | 242 | 243 |
| TEK | SR007_G02 | Intron fusion, exon | 367 aa | 244 | 245 |
| | | shorten | | | |
| TEK | SR007_H03 | Exon deletion, Intron | 468 aa | 246 | 247 |
| | | fusion | | | |
| TIE | SR006_A04 | Intron fusion | 251 aa | 253 | 254 |
| TIE | SR006_B07 | Intron fusion | 379 aa | 255 | 256 |
| TIE | SR006_B06 | Intron fusion | 161 aa | 257 | 258 |
| TIE | SR006_B12 | Intron fusion | 414 aa | 259 | 260 |
| TIE | SR006_B10 | Exon deletion | 317 aa | 261 | 262 |
| TIE | SR016_G03 | Intron fusion | 751 aa | 263 | 264 |
| TNFR1B | SR003_H02 | Intron fusion | 155 aa | 272 | 273 |
| VEGFR1 | SR004_C05 | Intron fusion | 174 aa | 274 | 275 |
| VEGFR1 | SR01_C02 | Intron fusion | 541 aa | n/a | 280 |
| VEGFR2 | SR015_F01 | Exon shorten | 712 aa | 282 | 283 |
| VEGFR3 | SR007_E10 | Exon short | 227 aa | 284 | 285 |
| VEGFR3 | SR007_F05 | Exon deletion | 295 aa | 286 | 287 |
| VEGFR3 | SR015_G09 | Intron fusion | 765 aa | 288 | 289 |
| HGF | SR023A02 | Intron fusion | 467 aa | 349 | 350 |
| HGF | SR023A08 | Intron fusion | 472 aa | 351 | 352 |
| HGF | SR023E09 | Intron fusion | 514 aa | 353 | 354 |

### Example 2

[0633] Preparation and Expression of Intron Fusion Protein Constructs in Human Cells

[0634] A. Generation of tPA cDNA

[0635] In order to obtain human tissue plasminogen activator (tPA) cDNA, PCR primers specific for the 5′ portion of the human tissue plasminogen activator (tPA) including the tPA signal/pro sequence (based on the human tPA cDNA sequence as set forth in SEQ ID NO: 1) were selected based on the published information (Kohne et al (1999) J Cellular Biochem 75:446-461) and synthesized by Qiagen-Operon (Richmond, Calif.). The sequences of the primers are set forth in SEQ ID NO:7 and SEQ ID NO:8. Each PCR reaction contained 10 ng of reverse transcribed cDNA, 0.025 U/μl TaqPlus (Stratagene), 0.0035 U/μl PfuTurbo (Stratagene), 0.2 mM dNTP (Amersham, Piscataway, N.J.), and 0.2 μM forward and reverse primers in a total volume of 50 μl. PCR conditions were 35 cycles at 94.50° C. for 45 s, 58° C. for 50 s, and 72° C. for 5 min. The reaction was terminated with an elongation step of 720° C. for 10 min. PCR products were electrophoresed on a 1% agarose gel, and DNA from detectable bands was stained with Gelstar (BioWhitaker Molecular Application, Walkersville, Md.). The DNA bands were extracted with the QiaQuick gel extraction kit (Qiagen, Valencia, Calif.), ligated into the pDrive UA-cloning vector (Qiagen), and transformed into Escherichia coli for purification of the pDrive-tPA vector.

[0636] B. PCR Amplification and Expression cloning of the tPA Signal/Pro Sequence

[0637] In order to clone the portion of the nucleic acid that includes the nucleotides encoding the tPA signal/pro sequence (see Table 11) as set forth in SEQ ID NO: 1, PCR was performed using the primers as forth in SEQ ID NO:9 and SEQ ID NO:10 (see Table 12). The primers were generated to contain restriction enzyme cleavage sites for Nhe I and Xho I, as well as a myc-tag, to facilitate cloning of the amplified product into the pCI expression plasmid (Promega). Alternatively, restriction enzyme cleavage sites for EcoRI and Xba I were generated by running a PCR reaction with the primers as set forth in SEQ ID NO: 11 and SEQ ID NO: 12, and the amplified product was cloned into the pcDNA 3.1 expression plasmid (Invitrogen). The PCR reaction was performed as above with 10 ng pDrive-tPA. The PCR conditions included 35 cycles at 94.5° C. for 45 s, 580° C. for 50 s, and 72° C. for 5 min. The reaction was terminated with an elongation step of 72° C. for 10 min. The tPA encoded cDNA was digested with Nhe I and Xho I or with EcoRI and Xba I to generate the tPA signal/pro sequence fragment and subcloned into the pCI expression plasmid (Promega) at the Nhe I and Xho I sites to form the pCI-tPA:myc vector or subcloned into the pcDNA3.1 expression plasmid (Invitrogen) at the EcoR I and Xba I site to form the pcDNA3.1-tPA vector.

TABLE 11
LIST OF GENES FOR CLONING tPA-intron fusion protein
CONSTRUCTS

| | | SEQ | | | SEQ |
|---|---|---|---|---|---|
| | | ID | | | ID |
| nt ACC. # | Description | NO: | ORF | prt ACC.# | NO: |
| NM_000930 | tPA | 3 | | NP_000921 | 4 |
| | tPA pre/pro | 1 | | | 2 |
| | sequence | | | | |

[0638] C. Cloning of Intron Fusion Proteins into the pCI-tPA Vector

[0639] Intron fusion proteins were PCR amplified from their pDrive sequencing vector, respectively, and subsequently cloned into the pCI-tPA:myc vector. For the PCR amplification, the forward primers contain an Xho I site, and the reverse primers contain a Not I site. VEGFR1-intron fusion protein without a signal sequence (SEQ ID NO. 279) was PCR amplified using the primers as set forth in SEQ ID NOS:13 and 14. The Met-intron fusion protein without a signal sequence (SEQ ID NO. 214) was amplified using the primers as set forth in SEQ ID NOS:15 and 16. The FGFR2-intron fusion protein without a signal sequence (SEQ ID NO:180) was PCR amplified using the primers as set forth in SEQ ID NOS:17 and 18. The FGFR2-intron fusion protein without a signal sequence (SEQ ID NO:178) was PCR amplified using the primers as set forth in SEQ ID NOS:21 and 22. The FGFR-4-intron fusion protein without a signal sequence (SEQ ID NO: 185) was PCR amplified using the primers set forth in SEQ ID NO:23 and 24. The RAGE intron fusion protein without a signal sequence (see e.g., SEQ ID NO:237) was PCR amplified using primers set forth in SEQ ID NOS:25 and 26. The TEK intron fusion protein without a signal sequence (see e.g., SEQ ID NO:245) was PCR amplified using the primers set forth in SEQ ID NO:27 and 28. The RON intron fusion protein without a signal sequence (see e.g., SEQ ID NO:223) was PCR amplified using the primers set forth in SEQ ID NO:29 and 30. Each PCR reaction contained 10 ng of reverse transcribed cDNA, 0.025 U/μl TaqPlus (Stratagene), 0.0035 U/μl PfuTurbo (Stratagene), 0.2 mM dNTP (Amersham, Piscataway, N.J.), and 0.2 μM forward and reverse primers in a total volume of 50 μl. PCR conditions were 25 cycles and 94.5° C. for 45 s, 580° C. for 50 s, and 72° C. for 5 min. The reaction was terminated with an elongation step of 720° C. for 10 min. PCR products were electrophoresed on a 1% agarose gel, and DNA from detectable bands was stained with Gelstar (BioWhitaker Molecular Application, Walkersville, Md.). The DNA bands were extracted with the QiaQuick gel extraction kit (Qiagen, Valencia, Calif.), subcloned into the pCI-tPA:myc vector at the Xho I and Not I sites downstream of the tPA/pro sequence to generate tPA:myc-intron fusion protein constructs as set forth in SEQ ID NOS. 31-35, 39-47 (nucleotide) and 32-36, 40-48 (amino acid).

[0640] The nucleic acid encoding herstatin (Dimercept™)-intron fusion protein without a signal sequence, as set forth in SEQ ID NO:289, was PCR amplified from pcDNA3.1 His-Herstatin (provided by Gail Clinton (OHSU)) and subsequently cloned into the pcDNA3.1-tPA vector. For the PCR amplification, the forward primers were generated to contain an Xba I site, and the reverse primers to contain a Not I site. The cDNA encoding the herstatin-intron fusion protein was amplified using the primers as set forth in SEQ ID NOS:19 and 20. The PCR reaction was performed as described above. PCR products were purified and subcloned into the pcDNA3.1-tPA vector at the Xba I and Not I sites to generate tpA-HER2 intron fusion protein construct as set forth in SEQ ID NO. 37 (nucleotide) and SEQ ID NO. 38 (amino acid). Exemplary tPA-intron fusion protein fusion proteins are set forth in Table 13.

TABLE 12
PRIMERS FOR PCR CLONING.

| SEQ | | | |
|---|---|---|---|
| ID | | | |
| NO | Primer | ID | Sequence |
| 7 | tPA_F | | CTCTGCGAGGAAAGGGAAGGA |
| 8 | tPA_R | | CGTGCCCCTGTAGCTGATGCC |
| 9 | tPApre/pro_F1 | | ATTAGCTAGCCACCATGGATGCAA |
| | | | TGAAGAGAGGG |
| 10 | tPApre/pro_R1 | | ATTACTCGAGCAGATCCTCTTCTG |
| | | | AGATGAGTTTTTGTTCTGGCTCCT |
| | | | CTTCGAATCG |
| 11 | tPApre/pro_F2 | | ATTAGAATTCCACCATGGATGCAA |
| | | | TGAAGAGAGGG |
| 12 | tPApre/pro_R2 | | ATTATCTAGATCTGGCTCCTCTTC |
| | | | TGAATCG |
| 13 | VEGFR11FP_F | SR018_C02 | AAGGCTCGAGTCAAAATTAAAAGA |
| | | | TCCTGAAC |
| 14 | VEGFR11FP_R | SR018_C02 | AAGGAAAAAAGCGGCCGCTCACGG |
| | | | AAGGAAATGGAAG |
| 15 | METIFP_F | SR020_H07 | AAGGCTCGAGTGTAAAGAGGCA |
| | | | CTAGCAAAG |
| 16 | METIFP_R | SR020_H07 | AAGGAAAAAAGCGGCCGCTCACGG |
| | | | AAGGAAATGGAAG |
| 17 | FGFR2IFP_F | SR022_D06 | AAGGCTCGAGCCCTCCTTCAGTTT |
| | | | AGTTGA |
| 18 | FGFR2IFP_R | SR022_D06 | AAGGAAAAAAGCGGCCGCTTATGC |
| | | | AAGGATAAAAGGGG |
| 19 | DCPTIFP_F | Herstatin | AATTTCTAGACAAGTGTGCACCGG |
| | | | CACAGAC |
| 20 | DCPTIFP_R | Herstatin | AAGGAAAAGCGGCCGCTCAGCCTT |
| | | | CATACCGGGAC |
| 21 | FGFR2IFP_F2 | SR022_D04 | AATTCTCGAGCCCTCCTTCAGTTT |
| | | | AGTTGA |
| 22 | FGFR2IFP_R2 | SR022_D04 | AATTGAATTC TTATGCAAGGATA |
| | | | AAAGGGGC |
| 23 | FGFR4LFP_F | SR002_A10 | AATTCTCGAGGAGGAAGTGGAGCT |
| | | | TGAGCC |
| 24 | FGFR4IFP_R | SR002_A10 | AATTGAATTCCTAACTCAGTCCCT |
| | | | CCCAG |
| 25 | RAGEIFP_F | SR021_C02 | AATTCTCGAGCAAAACATCACAGC |
| | | | CCGGA |
| 26 | RAGEIFP_R | SR021_C02 | AATTGAATTCCTAAGGGTCAGACT |
| | | | TCCAGA |
| 27 | TEKIFP_F | SR007_G02 | AATTCTCGAGGTGGAAGGTGCCAT |
| | | | GGACT |
| 28 | TEKIFP_R | SR007_G02 | AATTGAATTCTTACCACTGTTTAC |
| | | | TTCTATATGA |
| 29 | RONIFP_F | SR014_C09 | AATTCTCGAGGACTGGCAGTGCCC |
| | | | GCG |
| 30 | RONIFP_R | SR014_C09 | AATTGAATTCTCATGAGGACCAGC |
| | | | CAGTAG |

[0641] TABLE 13
tPA-intron fusion protein Fusions

| | | SEQ ID NO | SEQ ID NO |
|---|---|---|---|
| ID | Isoform Type | (nucleotide) | (amino acid) |
| SR018C02 | tPA-myc-VEGFR-1 | 31 | 32 |
| SR02H07 | tPA-myc-MET | 33 | 34 |
| SR022D06 | tPA-myc-FGFR-2 | 35 | 36 |
| Herstatin | tPA_DCPT | 37 | 38 |
| SR022D04 | tPA-myc-FGFR-2 | 39 | 40 |
| SR002A10 | tPA-myc-FGFR-4 | 41 | 42 |
| SR021C02 | tPA-myc-RAGE | 43 | 44 |
| SR007G02 | tPA-myc-TEK | 45 | 46 |
| SR014C09 | tPA-myc-RON | 47 | 48 |

D. Protein Expression and Secretion

[0642] Medium from cultured human cells was assessed for secretion of each of the tPA-intron fusion proteins. To express the tPA-intron fusion proteins in human cells, human embryonic kidney 293T cells were seeded at 2×10⁶ cells/well in a 6-well plate and maintained in Dulbecco's modified Eagle's medium (DMEM) and 10% fetal bovine serum (Invitrogen). Cells were transfected using LipofectAMINE 2000 (Invitrogen) following the manufacturer's instructions. On the day of transfection, 5 μg plasmid DNA was mixed with 15 μl of LipofectAMINE 2000 in 0.5 ml of serum-free DMEM. The mixture was incubated for 20 minutes at room temperature before it was added to the cells. Cells were incubated at 37° C. in a CO₂ incubator for 48 hours. To study the protein secretion of intron fusion proteins, the conditioned media was collected 48 hours after transfection and expression levels were analyzed by Western blotting. Conditioned media was analyzed by separation on SDS-polyacrylamide gels followed by immunoblotting using an anti-Myc antibody (Invitrogen) or an anti-Herstatin antibody (Upstate). Antibodies were diluted 1:5000. To study the cellular protein expression of the intron fusion proteins, after cell culture media was removed, the transfected cells were harvested and lysed in a cell lysis buffer (PBS/0.25% Triton X-100). Lysates were clarified by centrifugation to remove insoluble cell debris. Typically, 10 μg protein from each sample was separated on an SDS-PAGE gel after protein concentrations were determined. Cell lysates were analyzed by Western blotting using an anti-Myc antibody (Invitrogen) or an anti-Herstatin antibody (Upstate). Expression and secretion of intron fusion proteins containing a tPA pre/prosequence were compared to intron fusion proteins containing the original or endogenous signal peptide. Comparisons of expression and secretion of intron fusion proteins are depicted in Table 14 and Table 15.

TABLE 14
Summary of intron fusion protein Protein Expression and Secretion

| intron | | Protein | Protein | Protein | Protein |
|---|---|---|---|---|---|
| fusion | | Expression w/ | Secretion w/ | Expression w/ | Secretion w/ |
| protein ID | Gene | Original sp | Original sp | tPA sp | tPA sp |
| SR018C02 | VEGFR1 | − | − | +++ | +++ |
| SR020H07 | MET | ++ | − | +++ | +++ |
| SR022D04 | FGFR2 | ++ | + | +++ | +++ |
| SR021C02 | RAGE | ++ | + | +++ | +++ |
| SR002A10 | FGFR4 | ++ | − | ++ | + |
| SR007G02 | TEK | ++ | − | ++ | + |
| SR014C09 | RON | ++ | − | ++ | + |
| Herstatin | HER2 | +++ | − | +++ | +++ |
| SR022D06 | FGFR2 | ++ | + | +++ | +++ |

[0643] TABLE 15
tPA-intron fusion protein fusion facilitates secretion of the
recombinant intron fusion proteins in 293T cells

| tPA-intron | | Fold increase in |
|---|---|---|
| fusion protein | Clone ID | Protein Secretion |
| tPA-FGFR-2 | SR022D06 | 5 |
| tPA-VEGFR-1 | SR018C02 | 10 |
| tPA-MET | SR020H07 | 30 |
| tPA-HER2 | Herstatin | 30 |

### Example 3

[0644] Herstatin (Dimercept™) Purification and Cell-Based Growth Inhibition Assays

[0645] A. Transient Expression of tPA-HER2 Using 293T Cells

[0646] 293T cells (ATCC) were maintained in DMEM/10% fetal bovine serum. For transfection, cells were seeded at a density of 1×10⁷ per 100-mm cell culture plate. Transient transfection was carried out 24 hours later using LipofectAmine™ 2000 reagent (Invitrogen) following the manufacturer's recommendation. Briefly, 293T cells were fed with serum-free DMEM immediately before the transfection started. For transfection of each of the 293T cell plate, 75 μl of LipofectAmine 2000 and 25 μg of the tPA-HER2 expression construct (or a pcDNA control plasmid) were mixed in 2 ml of serum-free DMEM. The DNA-LipofectAmine mixture was incubated at room temperature for 20 min and then applied dropwise to the 293T cell plate. Supernatants from the transfected cells were collected 48 hours later, centrifuged, and filtered to remove remaining cells. Clarified supernatants were processed for protein purification.

[0647] B. Purification of a Partially Purified Herstatin (Dimercept™)

[0648] Transiently transfected conditioned cell culture medium containing the expressed herstatin protein product encoded by the construct was concentrated approximately 10 fold either using tangential flow membranes or using stirred cell system filters, exhibiting a 10,000 molecular weight separation cutoff. The materials retained by the membrane or filter were further processed. Following the aforementioned concentration/volume reduction, the sample was diluted with cold 50 mM sodium acetate, pH 5.5 (the sample was diluted with either one or two equal volumes of buffer) and the pH was monitored and adjusted using acetic acid or HCl, as required to achieve a final pH of 5.5. After pH adjustment, the conditioned medium was passed through a 0.45 micron filter to remove any particulates, prior to column chromatography.

[0649] The above mentioned concentrated/conditioned material was subsequently loaded (50-300 ml of feed per 5 ml bed volume; 1-3 ml/min flow rate) onto an SP-Sepharose ion exchange chromatography column, equilibrated in 50 mM sodium acetate, pH 5.5. The load was washed onto the column using column equilibration buffer, and the washed eluate monitored until the optical absorbance at 280 nm was minimal and constant. The resulting flow through and wash of the column was retained for later evaluation.

[0650] Column elution of bound protein was performed using an isocratic step elution approach employing, in serial sequence, the following buffers: 50 mM sodium acetate, pH 5.5, 200 mM sodium chloride; 50 mM sodium acetate, pH 5.5, 500 mM sodium chloride; 50 mM sodium acetate, pH 5.5, 1M sodium chloride; and, 50 mM sodium acetate, pH 5.5, 2M sodium chloride. At each elution stage, the 280 nm absorbance profile of the eluate was monitored and a baseline-to-baseline pool was made containing the materials eluted from the column under those respective conditions. Immediately upon pooling of the fractions, the pH was adjusted to between 7.0 and 7.5 using 1M Tris-HCl, pH 8 (˜10 μl/ml of fraction pool).

[0651] Most operations were carried out at 2-8° C. Materials thus prepared and aliquots of all fractions generated during the isolation process were stored either at 2-8° C. or −80° C. until further analysis.

[0652] C. Assay Purified Herstatin (Dimercept™) for Anti-Proliferative Activity

[0653] Bioassay Assessment—Alamar Blue Growth Inhibitory Assay for Herstatin

[0654] DU-145 cells were seeded in 96-well plate, 5000/well in DMEM containing 2% fetal bovine serum on the day before the assay. Cells were treated with 2-fold serial dilution of pooled fractions of purified herstatin (nDcp) and controls (representing 10%, 5%, 2.5%, 1.25%, and 0.75% if the assay volume) in 0.2% of FBS/DMEM. After 5 days of incubation at 37° C., cell density in the wells was measured by the Alamar Blue (Sigma Cat. # R7017) method. 100 μl of 2× Alamar Blue was added to each well containing 100 μl culture medium and fluorescence was measured of each treated and control wells at Ex.=530 mn /Em.=590 nm in 2-4 hours. DU145 growth inhibition was analyzed by dose-responsive curve based on fluorescence reading and compared to results from control treatments. The purified herstatin pooled fraction inhibited cell proliferation and growth by about 15% at a concentration of 0.75% of the assay volume with maximum inhibition observed (80% inhibition compared to a pcDNA control) at 1.25% of the assay volume.

[0655] Since modifications will be apparent to those of skill in this art, it is intended that this invention be limited only by the scope of the appended claims.

1. A polypeptide, comprising a receptor tyrosine kinase (RTK) isoform operatively linked directly or indirectly via a polypeptide linker to a heterologous precursor sequence or a sufficient portion thereof to effect secretion, processing and/or trafficking of the linked RTK intron fusion protein.

2. The polypeptide of claim 1, wherein the RTK isoform contains an endogenous signal sequence.

3. The polypeptide of claim 1, wherein the RTK isoform does not contain an endogenous signal sequence.

4. The polypeptide of claim 1, wherein the precursor sequence is selected from among a tissue plasminogen activator (tPA) pre/prosequence or a sufficient portion thereof to effect secretion, and allelic and species variants thereof.

5. The polypeptide of claim 4, wherein the tPA pre/prosequence is a mammalian tPA pre/prosequence.

6. The polypeptide of claim 4, wherein the tPA pre/prosequence comprises the sequence of amino acids set forth in SEQ ID NO:2 or allelic variants thereof or variants that have at least about 80%, 85%, 90%, 95%, 96%, 97%, 98%, 99% or more sequence identity, wherein and the tPA portion effects secretion, processing and/or trafficking of the linked RTK isoform.

7. The polypeptide of claim 1, wherein the RTK isoform is selected from among a VEGFR, FGFR, PDGFR, MET, EPH, TIE, DDR and HER fusion protein.

8. The polypeptide of claim 7, wherein the RTK isoform is selected from a DDR1, EphA1, EphA2, EphA8, EphB1, EphB4, EGFR, HER-2 (ErbB2), ErbB3, FGFR-1, FGFR-2, FGFR-4, MET, RON, CSF1R, KIT, PDGFR-A, PDGFR-B, TEK, Tie-1, VEGFR-1, VEGFR-2, VEGFR-3 and allelic variants thereof or variants thereof that have at least about 80%, 85%, 90%, 95%, 96%, 97%, 98%, 99% or more sequence identity with any of these RTK isoforms, wherein the variants possess at least one activity of the corresponding RTK isoform.

9. The polypeptide of claim 8, wherein the RTK isoform comprises a sequence of amino acids set forth in any one of SEQ ID NOS: 140, 142, 143, 145, 147, 149, 150, 152, 153, 155, 157, 159, 161-168, 170, 172, 174, 176, 178, 180, 181, 183, 185, 186, 188, 190, 192, 194, 196, 198, 200, 202, 204, 206, 208, 210, 212, 214, 216, 217, 219, 221, 223, 225, 227, 229-231, 233, 245, 247-251, 253, 255, 257, 259, 261, 263-270, 274-280, 282, 284, 286, 288, 289-303 or an active portion thereof.

10. The polypeptide of claim 1, wherein the RTK isoform is operatively linked via a linker to a tPA precursor sequence or a sufficient portion thereof to effect secretion.

11. The polypeptide of claim 10, wherein the linker is a restriction enzyme linker that is encoded by a sequence of nucleotides recognized by one or more restriction enzymes.

12. The polypeptide of claim 11, wherein the restriction enzyme linker is joined between an isoform and a tPA pre/prosequence or a sufficient portion thereof to effect secretion.

13. The polypeptide of claim 1, further comprising a multimerization domain.

14. The polypeptide of claim 1, wherein the tag is linked between the restriction enzyme linker and a tPA precursor sequence or a sufficient portion thereof to effect secretion.

15. The polypeptide of claim 14, wherein the tag is a myc tag.

16. The polypeptide of claim 15, wherein the RTK isoform is selected from a VEGFR-1, FGFR-2, FGFR-4, TEK, RON, MET and allelic variants thereof or variants thereof that have at least about 80%, 85%, 90%, 95%, 96%, 97%, 98%, 99% or more sequence identity with any of these RTK isoforms, wherein the variants possess at least one activity of the corresponding RTK isoform.

17. The polypeptide of claim 1, comprising a sequence of amino acids set forth in any one of SEQ ID NOS: 32, 34, 36, 40, 42, 46 and or 48.

18. The polypeptide of claim 13, wherein the construct includes a restriction enzyme linker, and the tag is located between the restriction enzyme linker and the isoform.

19. The polypeptide of claim 13, wherein the tag is a Poly-His tag.

20. The polypeptide of claim 1, wherein the RTK isoform is HER-2 or an allelic variant thereof.

21. The polypeptide of claim 20, comprising a sequence of amino acids set forth in SEQ ID NO: 38.

22. A polypeptide, comprising a Receptor for Advanced Glycation Endproducts (RAGE) isoform operatively linked directly or indirectly via a polypeptide linker to a heterologous precursor sequence or a sufficient portion thereof to effect secretion and/or trafficking of the RAGE isoform, wherein the polypeptide optionally includes a tag that facilitates polypeptide purification and/or detection.

23. The polypeptide of claim 22, wherein the RAGE isoform contains an endogenous signal sequence.

24. The polypeptide of claim 23, wherein the RAGE isoform protein does not contain an endogenous signal sequence.

25. The polypeptide of claim 22, wherein the precursor sequence is a tissue plasminogen activator (tPA) pre/prosequence or a sufficient portion thereof to effect secretion, or allelic variants thereof or variants thereof that have at least about 80%, 85%, 90%, 95%, 96%, 97%, 98%, 99% or more sequence identity with the precursor sequence to effect secretion and/or processing or trafficking of the RAGE isoform.

26. The polypeptide of claim 25, wherein the tPA pre/prosequence is a mammalian tPA pre/prosequence.

27. The polypeptide of claim 25, wherein the tPA pre/prosequence comprises the sequence of amino acids set forth in SEQ ID NO:2, or allelic variants thereof.

28. The polypeptide of claim 22, wherein the RAGE isoform comprises a sequence of amino acids set forth in any of SEQ ID NOS: 235, 237, 239, 241, 243, or an active portion thereof or a variant thereof that has at least about 80%, 85%, 90%, 95%, 96%, 97%, 98%, 99% or more sequence identity therewith.

29. The polypeptide of any claim 22, wherein the RAGE isoform is operatively linked by a linker to a tPA pre/prosequence or a sufficient portion thereof to effect secretion.

30. The polypeptide of claim 29, wherein the linker is a restriction enzyme linker that is encoded by a sequence of nucleotides recognized by one or more restriction enzymes.

31. The polypeptide of claim 30, wherein the restriction enzyme linker is joined between the RAGE isoform or an active portion thereof and a tPA pre/prosequence or a sufficient portion thereof to effect secretion.

32. The polypeptide of claim 22, further comprising a multimerization domain.

33. The polypeptide of claim 22, wherein the polypeptide contains a restriction enzyme linker, and the tag is linked between the restriction enzyme linker and a tPA pre/prosequence or a sufficient portion thereof to effect secretion.

34. The polypeptide of claim 33, wherein the tag is a myc tag.

35. The polypeptide of claim 22, comprising a sequence of amino acids set forth in SEQ ID NO: 44.

36. A polypeptide, comprising a tumor necrosis factor receptor (TNFR) isoform operatively linked directly or indirectly via a linker to a heterologous precursor sequence or a sufficient portion thereof to effect secretion, processing and/or trafficking of the TNFR isoform, wherein the polypeptide optionally includes a tag that facilitates polypeptide purification and/or detection.

37. The polypeptide of claim 36, wherein the TNFR isoform contains an endogenous signal sequence.

38. The polypeptide of claim 36, wherein the TNFR isoform does not contain an endogenous signal sequence.

39. The polypeptide of claim 36, wherein the precursor sequence is a tissue plasminogen activator (tPA) pre/prosequence or a sufficient portion thereof to effect secretion, or allelic variants thereof or a variant thereof that has at least about 80%, 85%, 90%, 95%, 96%, 97%, 98%, 99% or more sequence identity therewith.

40. The polypeptide of claim 39, wherein the tPA pre/prosequence is a mammalian tPA pre/prosequence.

41. The polypeptide of claim 39, wherein the tPA pre/prosequence comprises the sequence of amino acids set forth in SEQ ID NO:2.

42. The polypeptide of claim 36, wherein the TNFR isoform is a TNFR1 or a TNFR2.

43. The polypeptide of claim 42, wherein the TNFR isoform is a TNFR2 isoform.

44. The polypeptide of claim 43, wherein the TNFR isoform comprises a sequence of amino acids set forth in SEQ ID NO: 272 or an active portion thereof or a variant thereof that has at least about 80%, 85%, 90%, 95%, 96%, 97%, 98%, 99% or more sequence identity therewith.

45. The polypeptide of claim 36, wherein the TNFR isoform is operatively linked by a linker to a tPA pre/prosequence or to a sufficient portion thereof to effect secretion, processing or trafficking.

46. The polypeptide of claim 45, wherein the linker is a restriction enzyme linker that is encoded by a sequence of nucleotides recognized by one or more restriction enzymes.

47. The polypeptide of claim 46, wherein the restriction enzyme linker is joined between an isoform or an active portion thereof and a tPA pre/prosequence or a sufficient portion thereof to effect secretion.

48. The polypeptide of claim 36, further comprising a multimerization domain.

49. The polypeptide of claim 36, wherein the polypeptide includes a restriction enzyme linker, and the tag is linked between the restriction enzyme linker and a tPA precursor sequence or a sufficient portion thereof to effect secretion.

50. The polypeptide of claim 36, wherein the tag is a myc tag.

51. A nucleic acid molecule, comprising a sequence of nucleotides that encodes a polypeptide of claim 1.

52. A nucleic acid molecule, comprising a sequence of nucleotides set forth in any one of SEQ ID NOS: 31, 33, 35, 37, 39, 41, 43, 45 and 47.

53. A vector, comprising the DNA construct of claim 51.

54. The vector of claim 53 that is a mammalian expression vector.

55. The vector of claim 54 that is selected from among a pCI vector and a pcDNA3.1 vector.

56. The vector of claim 53 that is selected from among an adenovirus vector, an adeno-associated virus vector, EBV, SV40, cytomegalovirus vector, vaccinia virus vector, herpesvirus vector, a retrovirus vector, a lentivirus vector, or an artificial chromosome.

57. The vector of claim 53 that is episomal or that integrates into the chromosome of a cell into which it is introduced.

58. A cell, comprising the vector of claim 53.

59. A cell of claim 58, that is a mammalian cell.

60. A cell of claim 59, wherein the mammalian cell is selected from among a mouse, rat, human, monkey, chicken, and hamster cell.

61. A cell of claim 59, wherein the cell is selected from among a CHO, Balb/3T3, HeLa, MT2, mouse NS0 and other myeloma cell lines, hybridoma and heterohybridoma cell lines, lymphocytes, fibroblasts, Sp2/0, COS, NIH3T3, HEK293, 293T, 293S, 2B8, and HKB cells, and EBNA-1 cell.

62. A method of producing a CSR isoform or a ligand isoform, comprising culturing a cell of claim 58, whereby the isoform is secreted.

63. The method of claim 62, further comprising purifying the secreted isoform from the cell culture.

64. The method of claim 63, wherein:
the isoform comprises an epitope tag for facilitating purification; and
the epitope tag is expressed on the protein.

65. The method of claim 63, wherein the purified protein is treated with an exoprotease.

66. The method of claim 65, wherein the exoprotease is a plasmin-like protease.

67. A method of producing a CSR isoform or a ligand isoform, comprising introducing a nucleic acid molecule encoding the isoform and a signal sequence, whereby the isoform is secreted from the cell.

68. The method of claim 67, wherein the cell is a mammalian cell.

69. The method of claim 68, wherein the mammalian cell is selected from among a mouse, rat, human, monkey, chicken, and hamster cell.

70. The method of claim 68, wherein the cell is selected from among a CHO, Balb/3T3, HeLa, MT2, mouse NS0 and other myeloma cell lines, hybridoma and heterohybridoma cell lines, lymphocytes, fibroblasts, Sp2/0, COS, NIH3T3, HEK293, 293T, 293S, 2B8, and HKB cells and EBNA-1 cells.

71. The method of claim 67, wherein the nucleic acid molecule comprises a sequence of nucleotides that encodes a polypeptide of any of SEQ ID NOS: 31, 33, 35, 37, 39, 41, 43, 45and 47.

72. The method of claim 67, wherein the nucleic acid molecule is introduced into a cell by a method selected from among transfection, electroporation, and nuclear microinjection.

73. The method of claim 67, wherein the nucleic acid molecule is introduced into a cell by using calcium phosphate, a cationic lipid reagent, or a polycation.

74. The method of claim 73, wherein the cationic lipid reagent is selected from among: a 1:1 (w/w) formulation of the cationic lipid N-[1-(2,3-dioleyloxy)propyl]-N,N,N-trimethylammonium chloride (DOTMA) and dioleoyl-phosphatidyl-ethanol-amine (DOPE); a 3:1 (w/w) formulation of polycationic lipid 2,3-dioleyloxy-N-[2(spermine-carboxamido) ethyl]-N,N-dimethyl-1-propanaminiumtrifluoroacetate (DOSPA) and dioleoyl phosphatidyl-ethanolamine (DOPE) and other compositions comprising one or more of DOTMA, DOSPA and DOPE.

75. The method of claim 67, further comprising purifying the secreted isoform from the cell culture.

76. The method of claim 75, wherein purifying the isoform is facilitated by an epitope tag expressed by the protein.

77. The method of claim 75, wherein the purified protein is treated with an exoprotease.

78. The method of claim 77, wherein the exoprotease is a plasmin-like protease.

79. A polypeptide, comprising a cell surface receptor (CSR) or ligand isoform wherein:
the polypeptide lacks an endogenous precursor sequence; and
the polypeptide contains one or more additional amino acids at its N-terminus.

80. The polypeptide of claim 79, wherein the endogenous precursor sequence comprises a signal sequence.

81. The polypeptide of claim 79, wherein the endogenous precursor sequence comprises a signal sequence and one additional amino acid.

82. The polypeptide of claim 79, wherein the CSR isoform is an isoform selected from among an RTK, TNFR, and RAGE isoform.

83. The polypeptide of claim 79, wherein the ligand isoform is an isoform of HGF.

84. The polypeptide claim 79, comprising all or a portion of a sequence of amino acids set forth in any one of SEQ ID NOS: 140, 142, 143, 145, 147, 149, 150, 152, 153, 155, 157, 159, 161-168, 170, 172, 174, 176, 178, 180, 181, 183, 185, 186, 188, 190, 192, 194, 196, 198, 200, 202, 204, 206, 208, 210, 212, 214, 216, 217, 219, 221, 223, 225, 227, 229-231, 233, 235, 237, 239, 241, 243, 245, 247-251, 253, 255, 257, 259, 261, 263-270, 272, 274-280, 282, 284, 286, 288, 289-303, 350, 352 and 354, allelic or species variants thereof and variants thereof that have at least about 80%, 85%, 90%, 95%, 96%, 97%, 98%, 99% or more sequence identity therewith and possess at least one activity of the corresponding polypeptide set forth in any of SEQ ID NOS: 140, 142, 143, 145, 147, 149, 150, 152, 153, 155, 157, 159, 161-168, 170, 172, 174, 176, 178, 180, 181, 183, 185, 186, 188, 190, 192, 194, 196, 198, 200, 202, 204, 206, 208, 210, 212, 214, 216, 217, 219, 221, 223, 225, 227, 229-231, 233, 235, 237, 239, 241, 243, 245, 247-251, 253, 255, 257, 259, 261, 263-270, 272, 274-280, 282, 284, 286, 288, 289-303, 350, 352 and 354.

85. The polypeptide of claim 79, wherein the one or more additional amino acid at the N-terminus is one or more of a restriction enzyme linker sequence or a portion of a prosequence of tPA or an epitope tag, wherein a restriction enzyme linker is encoded by a sequence of nucleotides recognized by one or more restriction enzymes.

86. The polypeptide of claim 79, wherein the one or more additional amino acids at the N-terminus are GAR, SR, or LE.

87. The polypeptide of claim 79, wherein the one or more additional amino acids at the N-terminus are GARSR or GARLE.

88. The polypeptide of claim 79, comprising a multimerization domain.

89. A pharmaceutical composition, comprising a polypeptide of any one of claims 1, 22, 36 and 79.

90. A method of treating a disease or condition comprising, administering to a subject a pharmaceutical composition of claim 89, wherein the disease or condition is mediated by a cognate CSR or ligand.

91. The method of claim 90, wherein the disease or condition is an inflammatory disease, cancer, angiogenesis-mediated disease, or a hyperproliferative disease.

92. The method of claim 91, wherein the disease or condition is selected from among ocular disease, atherosclerosis, diabetes, rheumatoid arthritis, hemangioma, wound healing, Alzheimer's disease, Creutzfeldt-Jakob disease, Huntington's disease, smooth muscle proliferative-related disease, multiple sclerosis, cardiovascular disease, and kidney disease.

93. The method of claim 91, wherein the cancer is selected from among carcinoma, lymphoma, blastoma, sarcoma, leukemia, lymphoid malignancies, squamous cell cancer, lung cancer including small-cell lung cancer, non-small-cell lung cancer, adenocarcinoma of the lung and squamous carcinoma of the lung, cancer of the peritoneum, hepatocellular cancer, gastric or stomach cancer including gastrointestinal cancer, pancreatic cancer, glioblastoma, cervical cancer, ovarian cancer, liver cancer, bladder cancer, hepatoma, breast cancer, colon cancer, rectal cancer, colorectal cancer, endometrial or uterine carcinoma, salivary gland carcinoma, kidney or renal cancer, prostate cancer, vulval cancer, thyroid cancer, hepatic carcinoma, anal carcinoma, penile carcinoma, and head and neck cancer.

94. A polypeptide, comprising a hepatocyte growth factor (HGF) isoform operatively linked directly or indirectly to a heterologous precursor sequence or a sufficient portion thereof to effect secretion and/or trafficking of the HGF isoform, wherein the polypeptide optionally includes a tag that facilitates polypeptide purification and/or detection.

95. The polypeptide of claim 94, wherein the HGF isoform contains an endogenous signal sequence.

96. The polypeptide of claim 95, wherein the HGF isoform does not contain an endogenous signal sequence.

97. The polypeptide of claim 94, wherein the precursor sequence is a tissue plasminogen activator (tPA) pre/prosequence or a sufficient portion thereof to effect secretion, or allelic variants thereof or variants that have at least about 80%, 85%, 90%, 95%, 96%, 97%, 98%, 99% or more sequence identity, wherein the variants effect secretion, processing and/or trafficking of the linked isoform.

98. The polypeptide of claim 97, wherein the tPA pre/prosequence is a mammalian tPA pre/prosequence.

99. The polypeptide of claim 97, wherein the tPA pre/prosequence comprises the sequence of amino acids set forth in SEQ ID NO:2, or allelic variants thereof.

100. The polypeptide of claim 94, wherein the HGF isoform comprises a sequence of amino acids set forth in any one of SEQ ID NOS: 350, 352, or 354 or an active portion thereof.

101. The polypeptide of claim 95, wherein the HGF isoform is operatively linked by a linker to a tPA pre/prosequence or a sufficient portion thereof to effect secretion, processing and/or trafficking of the linked isoform.

102. The polypeptide of claim 101, wherein the linker is a restriction enzyme linker that is encoded by a sequence of nucleotides recognized by one or more restriction enzymes.

103. The polypeptide of claim 102, wherein the restriction enzyme linker is joined between an isoform or an active portion thereof and a tPA pre/prosequence or a sufficient portion thereof to effect secretion.

104. The polypeptide of claim 94, wherein:
the polypeptide comprises a restriction enzyme linker, wherein the linker is a restriction enzyme linker that is encoded by a sequence of nucleotides recognized by one or more restriction enzyme; and
the tag is linked between the restriction enzyme linker and a tPA precursor sequence or a sufficient portion thereof to effect secretion.

105. The polypeptide of claim 94, wherein the tag is a myc tag.

106. A pharmaceutical composition, comprising a nucleic acid molecule of claim 51, wherein the disease or condition is mediated by a CSR or ligand therefor.

107. A method of treating a disease or condition, comprising:administering to a subject a pharmaceutical composition of claim 106, wherein the disease or condition is mediated by a cognate CSR or ligand.

108. The method of claim 107, wherein the disease or condition is an inflammatory disease, cancer, angiogenesis-mediated disease, or a hyperproliferative disease.

109. The method of claim 108, wherein the disease or condition is selected from among ocular disease, atherosclerosis, diabetes, rheumatoid arthritis, hemangioma, wound healing, Alzheimer's disease, Creutzfeldt-Jakob disease, Huntington's disease, smooth muscle proliferative-related disease, multiple sclerosis, cardiovascular disease, and kidney disease.

110. The method of claim 109, wherein the cancer is selected from among carcinoma, lymphoma, blastoma, sarcoma, leukemia, lymphoid malignancies, squamous cell cancer, lung cancer including small-cell lung cancer, non-small-cell lung cancer, adenocarcinoma of the lung and squamous carcinoma of the lung, cancer of the peritoneum, hepatocellular cancer, gastric or stomach cancer including gastrointestinal cancer, pancreatic cancer, glioblastoma, cervical cancer, ovarian cancer, liver cancer, bladder cancer, hepatoma, breast cancer, colon cancer, rectal cancer, colorectal cancer, endometrial or uterine carcinoma, salivary gland carcinoma, kidney or renal cancer, prostate cancer, vulval cancer, thyroid cancer, hepatic carcinoma, anal carcinoma, penile carcinoma, and head and neck cancer.

111. A nucleic acid molecule, comprising a sequence of nucleotides that encodes a polypeptide of claim 22.

112. A pharmaceutical composition, comprising the nucleic acid molecule of claim 111.

113. A nucleic acid molecule, comprising a sequence of nucleotides that encodes a polypeptide of claim 36.

114. A pharmaceutical composition, comprising the nucleic acid molecule of claim 113.

The application's sequence listing, which the Patent Office published only in electronic form, follows.

SEQUENCE LISTING (582 sequences)

SEQ ID NO: 1 - DNA, 105 bp, Homo sapiens
atggatgcaatgaagagagggctctgctgtgtgctgctgctgtgtggagcagtcttcgtttcgcccagccaggaaatccatgcccgattcagaagaggagccaga

SEQ ID NO: 2 - protein, 35 aa, Homo sapiens
MDAMKRGLCCVLLLCGAVFVSPSQEIHARFRRGAR

SEQ ID NO: 3 - DNA, 2653 bp, Homo sapiens
atggccctgtccactgagcatcctcccgccacacagaaacccgcccagccggggccaccgaccccaccccctgcctggaaacttaaggaggccggagctgtggggagctcagagctgagatcctacaggagtccagggctggagagaaaacctctgcgaggaaagggaaggagcaagccgtgaatttaagggacgctgtgaagcaatcatggatgcaatgaagagagggctctgctgtgtgctgctgctgtgtggagcagtcttcgtttcgcccagccaggaaatccatgcccgattcagaagaggagccagatcttaccaagtgatctgcagagatgaaaaaacgcagatgatataccagcaacatcagtcatggctgcgccctgtgctcagaagcaaccgggtggaatattgctggtgcaacagtggcagggcacagtgccactcagtgcctgtcaaaagttgcagcgagccaaggtgtttcaacgggggcacctgccagcaggccctgtacttctcagatttcgtgtgccagtgccccgaaggatttgctgggaagtgctgtgaaatagataccagggccacgtgctacgaggaccagggcatcagctacaggggcacgtggagcacagcggagagtggcgccgagtgcaccaactggaacagcagcgcgttggcccagaagccctacagcgggcggaggccagacgccatcaggctgggcctggggaaccacaactactgcagaaacccagatcgagactcaaagccctggtgctacgtctttaaggcggggaagtacagctcagagttctgcagcacccctgcctgctctgagggaaacagtgactgctactttgggaatgggtcagcctaccgtggcacgcacagcctcaccgagtcgggtgcctcctgcctcccgtggaattccatgatcctgataggcaaggtttacacagcacagaaccccagtgcccaggcactgggcctgggcaaacataattactgccggaatcctgatggggatgccaagccctggtgccacgtgctgaagaaccgcaggctgacgtgggagtactgtgatgtgccctcctgctccacctgcggcctgagacagtacagccagcctcagtttcgcatcaaaggagggctcttcgccgacatcgcctcccacccctggcaggctgccatctttgccaagcacaggaggtcgcccggagagcggttcctgtgcgggggcatactcatcagctcctgctggattctctctgccgcccactgcttccaggagaggtttccgccccaccacctgacggtgatcttgggcagaacataccgggtggtccctggcgaggaggagcagaaatttgaagtcgaaaaatacattgtccataaggaattcgatgatgacacttacgacaatgacattgcgctgctgcagctgaaatcggattcgtcccgctgtgcccaggagagcagcgtggtccgcactgtgtgccttcccccggcggacctgcagctgccggactggacggagtgtgagctctccggctacggcaagcatgaggccttgtctcctttctattcggagcggctgaaggaggctcatgtcagactgtacccatccagccgctgcacatcacaacatttacttaacagaacagtcaccgacaacatgctgtgtgctggagacactcggagcggcgggccccaggcaaacttgcacgacgcctgccagggcgattcgggaggccccctggtgtgtctgaacgatggccgcatgactttggtgggcatcatcagctggggcctgggctgtggacagaaggatgtcccgggtgtgtacaccaaggttaccaactacctagactggattcgtgacaacatgcgaccgtgaccaggaacacccgactcctcaaaagcaaatgagatcccgcctcttcttcttcagaagacactgcaaaggcgcagtgcttctctacagacttctccagacccaccacaccgcagaagcgggacgagaccctacaggagagggaagagtgcattttcccagatacttcccattttggaagttttcaggacttggtctgatttcaggatactctgtcagatgggaagacatgaatgcacactagcctctccaggaatgcctcctccctgggcagaaagtggccatgccaccctgttttcagctaaagcccaacctcctgacctgtcaccgtgagcagctttggaaacaggaccacaaaaatgaaagcatgtctcaatagtaaaagataacaagatctttcaggaaagacggattgcattagaaatagacagtatatttatagtcacaagagcccagcagggcctcaaagttggggcaggctggctggcccgtcatgttcctcaaaagcacccttgacgtcaagtctccttcccctttccccactccctggctctcagaaggtattccttttgtgtacagtgtgtaaagtgtaaatcctttttctttataaactttagagtagcatgagagaattgtatcatttgaacaactaggcttcagcatatttatagcaatccatgttagtttttactttctgttgccacaaccctgttttatactgtacttaataaattcagatatatttttcacagtttttcc

SEQ ID NO: 4 - protein, 562 aa, Homo sapiens
MDAMKRGLCCVLLLCGAVFVSPSQEIHARFRRGARSYQVICRDEKTQMIYQQHQSWLRPVLRSNRVEYCWCNSGRAQCHSVPVKSCSEPRCFNGGTCQQALYFSDFVCQCPEGFAGKCCEIDTRATCYEDQGISYRGTWSTAESGAECTNWNSSALAQKPYSGRRPDAIRLGLGNHNYCRNPDRDSKPWCYVFKAGKYSSEFCSTPACSEGNSDCYFGNGSAYRGTHSLTESGASCLPWNSMILIGKVYTAQNPSAQALGLGKHNYCRNPDGDAKPWCHVLKNRRLTWEYCDVPSCSTCGLRQYSQPQFRIKGGLFADIASHPWQAAIFAKHRRSPGERFLCGGILISSCWILSAAHCFQERFPPHHLTVILGRTYRVVPGEEEQKFEVEKYIVHKEFDDDTYDNDIALLQLKSDSSRCAQESSVVRTVCLPPADLQLPDWTECELSGYGKHEALSPFYSERLKEAHVRLYPSSRCTSQHLLNRTVTDNMLCAGDTRSGGPQANLHDACQGDSGGPLVCLNDGRMTLVGIISWGLGCGQKDVPGVYTKVTNYLDWIRDNMRP

SEQ ID NO: 5 - DNA, 105 bp, Homo sapiens
  allele 101: n = C or A
atggatgcaatgaagagagggctctgctgtgtgctgctgctgtgtggagcagtcttcgtttcgcccagccaggaaatccatgcccgattcagaagaggagncaga

SEQ ID NO: 6 - protein, 35 aa, Homo sapiens
  VARIANT 34: Xaa= A or D
MDAMKRGLCCVLLLCGAVFVSPSQEIHARFRRGXR

SEQ ID NO: 7 - DNA, 21 bp, Artificial Sequence
  Primer tPA_F
ctctgcgaggaaagggaagga

SEQ ID NO: 8 - DNA, 21 bp, Artificial Sequence
  Primer tPA_R
cgtgcccctgtagctgatgcc

SEQ ID NO: 9 - DNA, 35 bp, Artificial Sequence
  Primer tPApre/pro_F1
attagctagccaccatggatgcaatgaagagaggg

SEQ ID NO: 10 - DNA, 58 bp, Artificial Sequence
  Primer tPApre/pro_R1
attactcgagcagatcctcttctgagatgagtttttgttctggctcctcttcgaatcg

SEQ ID NO: 11 - DNA, 35 bp, Artificial Sequence
  Primer tPApre/pro_F2
attagaattccaccatggatgcaatgaagagaggg

SEQ ID NO: 12 - DNA, 31 bp, Artificial Sequence
  Primer tPApre/pro_R2
attatctagatctggctcctcttctgaatcg

SEQ ID NO: 13 - DNA, 32 bp, Artificial Sequence
  Primer VEGFR1IFP_F
aaggctcgagtcaaaattaaaagatcctgaac

SEQ ID NO: 14 - DNA, 37 bp, Artificial Sequence
  Primer VEGFR1IFP_R
aaggaaaaaagcggccgctcacggaaggaaatggaag

SEQ ID NO: 15 - DNA, 31 bp, Artificial Sequence
  Primer METIFP_F
aaggctcgagtgtaaagaggcactagcaaag

SEQ ID NO: 16 - DNA, 37 bp, Artificial Sequence; identical to SEQ ID NO: 14
  Primer METIFP_R

SEQ ID NO: 17 - DNA, 30 bp, Artificial Sequence
  Primer FGFR2IFP_F
aaggctcgagccctccttcagtttagttga

SEQ ID NO: 18 - DNA, 38 bp, Artificial Sequence
  Primer FGFR2IFP_R
aaggaaaaaagcggccgcttatgcaaggataaaagggg

SEQ ID NO: 19 - DNA, 31 bp, Artificial Sequence
  Primer DCPTIFP_F
aatttctagacaagtgtgcaccggcacagac

SEQ ID NO: 20 - DNA, 35 bp, Artificial Sequence
  Primer DCPTIFP_R
aaggaaaagcggccgctcagccttcataccgggac

SEQ ID NO: 21 - DNA, 30 bp, Artificial Sequence
  Primer FGFR2IFP_F2
aattctcgagccctccttcagtttagttga

SEQ ID NO: 22 - DNA, 31 bp, Artificial Sequence
  Primer FGFR2IFP_R2
aattgaattcttatgcaaggataaaaggggc

SEQ ID NO: 23 - DNA, 30 bp, Artificial Sequence
  Primer FGFR4IFP_F
aattctcgaggaggaagtggagcttgagcc

SEQ ID NO: 24 - DNA, 29 bp, Artificial Sequence
  Primer FGFR4IFP_R
aattgaattcctaactcagtccctcccag

SEQ ID NO: 25 - DNA, 29 bp, Artificial Sequence
  Primer RAGEIFP_F
aattctcgagcaaaacatcacagcccgga

SEQ ID NO: 26 - DNA, 30 bp, Artificial Sequence
  Primer RAGEIFP_R
aattgaattcctaagggtcagacttccaga

SEQ ID NO: 27 - DNA, 29 bp, Artificial Sequence
  Primer TEKIFP_F
aattctcgaggtggaaggtgccatggact

SEQ ID NO: 28 - DNA, 34 bp, Artificial Sequence
  Primer TEKIFP_R
aattgaattcttaccactgtttacttctatatga

SEQ ID NO: 29 - DNA, 27 bp, Artificial Sequence
  Primer RONIFP_F
aattctcgaggactggcagtgcccgcg

SEQ ID NO: 30 - DNA, 30 bp, Artificial Sequence
  Primer RONIFP_R
aattgaattctcatgaggaccagccagtag

SEQ ID NO: 31 - DNA, 1686 bp, Artificial Sequence
  tPA-myc-VEGFR-1
atggatgcaatgaagagagggctctgctgtgtgctgctgctgtgtggagcagtcttcgtttcgcccagccaggaaatccatgcccgattcagaagaggagccagagaacaaaaactcatctcagaagaggatctgctcgagtcaaaattaaaagatcctgaactgagtttaaaaggcacccagcacatcatgcaagcaggccagacactgcatctccaatgcaggggggaagcagcccataaatggtctttgcctgaaatggtgagtaaggaaagcgaaaggctgagcataactaaatctgcctgtggaagaaatggcaaacaattctgcagtactttaaccttgaacacagctcaagcaaaccacactggcttctacagctgcaaatatctagctgtacctacttcaaagaagaaggaaacagaatctgcaatctatatatttattagtgatacaggtagacctttcgtagagatgtacagtgaaatccccgaaattatacacatgactgaaggaagggagctcgtcattccctgccgggttacgtcacctaacatcactgttactttaaaaaagtttccacttgacactttgatccctgatggaaaacgcataatctgggacagtagaaagggcttcatcatatcaaatgcaacgtacaaagaaatagggcttctgacctgtgaagcaacagtcaatgggcatttgtataagacaaactatctcacacatcgacaaaccaatacaatcatagatgtccaaataagcacaccacgcccagtcaaattacttagaggccatactcttgtcctcaattgtactgctaccactcccttgaacacgagagttcaaatgacctggagttaccctgatgaaaaaaataagagagcttccgtaaggcgacgaattgaccaaagcaattcccatgccaacatattctacagtgttcttactattgacaaaatgcagaacaaagacaaaggactttatacttgtcgtgtaaggagtggaccatcattcaaatctgttaacacctcagtgcatatatatgataaagcattcatcactgtgaaacatcgaaaacagcaggtgcttgaaaccgtagctggcaagcggtcttaccggctctctatgaaagtgaaggcatttccctcgccggaagttgtatggttaaaagatgggttacctgcgactgagaaatctgctcgctatttgactcgtggctactcgttaattatcaaggacgtaactgaagaggatgcagggaattatacaatcttgctgagcataaaacagtcaaatgtgtttaaaaacctcactgccactctaattgtcaatgtgaaaccccagatttacgaaaaggccgtgtcatcgtttccagacccggctctctacccactgggcagcagacaaatcctgacttgtaccgcatatggtatccctcaacctacaatcaagtggttctggcacccctgtaaccataatcattccgaagcaaggtgtgacttttgttccaataatgaagagtcctttatcctggatgctgacagcaacatgggaaacagaattgagagcatcactcagcgcatggcaataatagaaggaaagaataagcttccaccagctaacagttctttcatgttgccacctacaagcttctcttccaactacttccatttccttccg

SEQ ID NO: 32 - protein, 562 aa, Artificial Sequence
  tPA-myc-VEGFR-1
MDAMKRGLCCVLLLCGAVFVSPSQEIHARFRRGAREQKLISEEDLLESKLKDPELSLKGTQHIMQAGQTLHLQCRGEAAHKWSLPEMVSKESERLSITKSACGRNGKQFCSTLTLNTAQANHTGFYSCKYLAVPTSKKKETESAIYIFISDTGRPFVEMYSEIPEIIHMTEGRELVIPCRVTSPNITVTLKKFPLDTLIPDGKRIIWDSRKGFIISNATYKEIGLLTCEATVNGHLYKTNYLTHRQTNTIIDVQISTPRPVKLLRGHTLVLNCTATTPLNTRVQMTWSYPDEKNKRASVRRRIDQSNSHANIFYSVLTIDKMQNKDKGLYTCRVRSGPSFKSVNTSVHIYDKAFITVKHRKQQVLETVAGKRSYRLSMKVKAFPSPEVVWLKDGLPATEKSARYLTRGYSLIIKDVTEEDAGNYTILLSIKQSNVFKNLTATLIVNVKPQIYEKAVSSFPDPALYPLGSRQILTCTAYGIPQPTIKWFWHPCNHNHSEARCDFCSNNEESFILDADSNMGNRIESITQRMAIIEGKNKLPPANSSFMLPPTSFSSNYFHFLP

SEQ ID NO: 33 - DNA, 2697 bp, Artificial Sequence
  tPA-myc-MET
atggatgcaatgaagagagggctctgctgtgtgctgctgctgtgtggagcagtcttcgtttcgcccagccaggaaatccatgcccgattcagaagaggagccagagaacaaaaactcatctcagaagaggatctgctcgagtgtaaagaggcactagcaaagtccgagatgaatgtgaatatgaagtatcagcttcccaacttcaccgcggaaacacccatccagaatgtcattctacatgagcatcacattttccttggtgccactaactacatttatgttttaaatgaggaagaccttcagaaggttgctgagtacaagactgggcctgtgctggaacacccagattgtttcccatgtcaggactgcagcagcaaagccaatttatcaggaggtgtttggaaagataacatcaacatggctctagttgtcgacacctactatgatgatcaactcattagctgtggcagcgtcaacagagggacctgccagcgacatgtctttccccgcaatcatactgctgacatacagtcggaggttcactgcatattctccccacagatagaagagcccagccagtgtcctgactgtgtggtgagcgccctgggagccaaagtcctttcatctgtaaaggaccggttcaccaacttctttgtaggcaataccataaattcttcttatttcccagatcatccattgcattcgatatcagtgagaaggctaaaggaaacgaaagatggttttatgtttttgacggaccagtcctacattgatgttttacctgagttcagagattcttaccccattaagtatgtccatgcctttgaaagcaacaattttatttacttcttgacggtccaaagggaaactctagatgctcagacttttcacacaagaataatcaggttctgttccataaactctggattgcattcctacatggaaatgcctctggagtgtattctcacagaaaagagaaaaaagagatccacaaagaaggaagtgtttaatatacttcaggctgcgtatgtcagcaagcctggggcccagcttgctagacaaataggagccagcccgaatgatgacattcttttcggagtgttcgcacaaagcaagccagattctgccgaaccaatggatcgatctgccatgtgtgcattccctatcaaatatgtcaacgacttcttcaacaagatcgtcaacaaaaacaatgtgagatgtctccagcatttttacggacccaatcatgagcactgctttaataggacacttctgagaaattcatcaggctgtgaagcgcgccgtgatgaatatcgaacagagttcaccacagctttgcagcgcgttgacttattcatgggtcaattcagcgaagtcctcttaacatctatatccaccttcattaaaggagacctcaccatagctaatcttgggacatcagagggtcgcttcatgcaggttgtggtttctcgatcaggaccatcaacccctcatgtgaattttctcctggactcccatccagtgtctccagaagtgattgtggagcatacattaaaccaaaatggctacacactggttatcactgggaagaagatcacgaagatcccattgaatggcttgggctgcagacatttccagtcctgcagtcaatgcctctctgccccaccctttgttcagtgtggctggtgccacgacaaatgtgtgcgatcggaggaatgcctgagcgggacatggactcaacagatctgtctgcctgcaatctacaaggttttcccaaatagtgcaccccttgaaggagggacaaggctgaccatatgtggctgggactttggatttcggaggaataataaatttgatttaaagaaaactagagttctccttggaaatgagagctgcaccttgactttaagtgagagcacgatgaatacattgaaatgcacagttggtcctgccatgaataagcatttcaatatgtccataattatttcaaatggccacgggacaacacaatacagtacattctcctatgtggatcctgtaataacaagtatttcgccgaaatacggtcctatggctggtggcactttacttactttaactggaaattacctaaacagtgggaattctagacacatttcaattggtggaaaaacatgtactttaaaaagtgtgtcaaacagtattcttgaatgttataccccagcccaaaccatttcaactgagtttgctgttaaattgaaaattgacttagccaaccgagagacaagcatcttcagttaccgtgaagatcccattgtctatgaaattcatccaaccaaatcttttattagtggtgggagcacaataacaggtgttgggaaaaacctgaattcagttagtgtcccgagaatggtcataaatgtgcatgaagcgggaaggaactttacagtggcatgtcaacatcgctctaattcagagataatctgttgtaccactccttccctgcaacagctgaatctgcaactccccctgaaaaccaaagcctttttcatgttagatgggatcctttccaaatactttgatctcatttatgtacataatcctgtgtttaagccttttgaaaagccagtgatgatctcaatgggcaatgaaaatgtactggaaattaaggtaagaaatgctttaaacactgtcttaaatcatcagctcaaacttaat

SEQ ID NO: 34 - protein, 899 aa, Artificial Sequence
  tPA-myc-MET
MDAMKRGLCCVLLLCGAVFVSPSQEIHARFRRGAREQKLISEEDLLECKEALAKSEMNVNMKYQLPNFTAETPIQNVILHEHHIFLGATNYIYVLNEEDLQKVAEYKTGPVLEHPDCFPCQDCSSKANLSGGVWKDNINMALVVDTYYDDQLISCGSVNRGTCQRHVFPRNHTADIQSEVHCIFSPQIEEPSQCPDCVVSALGAKVLSSVKDRFTNFFVGNTINSSYFPDHPLHSISVRRLKETKDGFMFLTDQSYIDVLPEFRDSYPIKYVHAFESNNFIYFLTVQRETLDAQTFHTRIIRFCSINSGLHSYMEMPLECILTEKRKKRSTKKEVFNILQAAYVSKPGAQLARQIGASPNDDILFGVFAQSKPDSAEPMDRSAMCAFPIKYVNDFFNKIVNKNNVRCLQHFYGPNHEHCFNRTLLRNSSGCEARRDEYRTEFTTALQRVDLFMGQFSEVLLTSISTFIKGDLTIANLGTSEGRFMQVVVSRSGPSTPHVNFLLDSHPVSPEVIVEHTLNQNGYTLVITGKKITKIPLNGLGCRHFQSCSQCLSAPPFVQCGWCHDKCVRSEECLSGTWTQQICLPAIYKVFPNSAPLEGGTRLTICGWDFGFRRNNKFDLKKTRVLLGNESCTLTLSESTMNTLKCTVGPAMNKHFNMSIIISNGHGTTQYSTFSYVDPVITSISPKYGPMAGGTLLTLTGNYLNSGNSRHISIGGKTCTLKSVSNSILECYTPAQTISTEFAVKLKIDLANRETSIFSYREDPIVYEIHPTKSFISGGSTITGVGKNLNSVSVPRMVINVHEAGRNFTVACQHRSNSEIICCTTPSLQQLNLQLPLKTKAFFMLDGILSKYFDLIYVHNPVFKPFEKPVMISMGNENVLEIKVRNALNTVLNHQLKLN

SEQ ID NO: 35 - DNA, 1263 bp, Artificial Sequence
  tPA-myc-FGFR-2
atggatgcaatgaagagagggctctgctgtgtgctgctgctgtgtggagcagtcttcgtttcgcccagccaggaaatccatgcccgattcagaagaggagccagagaacaaaaactcatctcagaagaggatctgctcgagccctccttcagtttagttgaggataccacattagagccagaagagccaccaaccaaataccaaatctctcaaccagaagtgtacgtggctgcgccaggggagtcgctagaggtgcgctgcctgttgaaagatgccgccgtgatcagttggactaaggatggggtgcacttggggcccaacaataggacagtgcttattggggagtacttgcagataaagggcgccacgcctagagactccggcctctatgcttgtactgccagtaggactgtagacagtgaaacttggtacttcatggtgaatgtcacagatgccatctcatccggagatgatgaggatgacaccgatggtgcggaagattttgtcagtgagaacagtaacaacaagagagcaccatactggaccaacacagaaaagacggaaaagcggctccatgctgtgcctgcggccaacactgtcaagtttcgctgcccagccggggggaacccaatgccaaccatgcggtggctgaaaaacgggaaggagtttaagcaggagcatcgcattggaggctacaaggtacgaaaccagcactggagcctcattatggaaagtgtggtcccatctgacaagggaaattatacctgtgtggtggagaatgaatacgggtccatcaatcacacgtaccacctggatgttgtggagcgatcgcctcaccggcccatcctccaagccggactgccggcaaatgcctccacagtggtcggaggagacgtagagtttgtctgcaaggtttacagtgatgcccagccccacatccagtggatcaagcacgtggaaaagaacggcagtaaatacgggcccgacgggctgccctacctcaaggttctcaaggccgccggtgttaacaccacggacaaagagattgaggttctctatattcggaatgtaacttttgaggacgctggggaatatacgtgcttggcgggtaattctattgggatatcctttcactctgcatggttgacagttctgccaggtatatactgttctttctctctgggtttttttcccttttcttggttgactgctataaaattaacacagcttctgttatcagaaatggccccttttatccttgca

SEQ ID NO: 36 - protein, 421 aa, Artificial Sequence
  tPA-myc-FGFR-2
MDAMKRGLCCVLLLCGAVFVSPSQEIHARFRRGAREQKLISEEDLLEPSFSLVEDTTLEPEEPPTKYQISQPEVYVAAPGESLEVRCLLKDAAVISWTKDGVHLGPNNRTVLIGEYLQIKGATPRDSGLYACTASRTVDSETWYFMVNVTDAISSGDDEDDTDGAEDFVSENSNNKRAPYWTNTEKTEKRLHAVPAANTVKFRCPAGGNPMPTMRWLKNGKEFKQEHRIGGYKVRNQHWSLIMESVVPSDKGNYTCVVENEYGSINHTYHLDVVERSPHRPILQAGLPANASTVVGGDVEFVCKVYSDAQPHIQWIKHVEKNGSKYGPDGLPYLKVLKAAGVNTTDKEIEVLYIRNVTFEDAGEYTCLAGNSIGISFHSAWLTVLPGIYCSFSLGFFPFSWLTAIKLTQLLLSEMAPFILA

SEQ ID NO: 37 - DNA, 1323 bp, Artificial Sequence
  tPA_DCPT
atggatgcaatgaagagagggctctgctgtgtgctgctgctgtgtggagcagtcttcgtttcgcccagccaggaaatccatgcccgattcagaagaggagccagatctagacaccaccatcatcaccatcaccatcaagtgtgcaccggcacagacatgaagctgcggctccctgccagtcccgagacccacctggacatgctccgccacctctaccagggctgccaggtggtgcagggaaacctggaactcacctacctgcccaccaatgccagcctgtccttcctgcaggatatccaggaggtgcagggctacgtgctcatcgctcacaaccaagtgaggcaggtcccactgcagaggctgcggattgtgcgaggcacccagctctttgaggacaactatgccctggccgtgctagacaatggagacccgctgaacaataccacccctgtcacaggggcctccccaggaggcctgcgggagctgcagcttcgaagcctcacagagatcttgaaaggaggggtcttgatccagcggaacccccagctctgctaccaggacacgattttgtggaaggacatcttccacaagaacaaccagctggctctcacactgatagacaccaaccgctctcgggcctgccacccctgttctccgatgtgtaagggctcccgctgctggggagagagttctgaggattgtcagagcctgacgcgcactgtctgtgccggtggctgtgcccgctgcaaggggccactgcccactgactgctgccatgagcagtgtgctgccggctgcacgggccccaagcactctgactgcctggcctgcctccacttcaaccacagtggcatctgtgagctgcactgcccagccctggtcacctacaacacagacacgtttgagtccatgcccaatcccgagggccggtatacattcggcgccagctgtgtgactgcctgtccctacaactacctttctacggacgtgggatcctgcaccctcgtctgccccctgcacaaccaagaggtgacagcagaggatggaacacagcggtgtgagaagtgcagcaagccctgtgcccgaggtacccactcactgcccccgaggccagctgcagttcctgtccctctgcgcatgcagcctggcccagcccaccctgtcctatccttcctcagaccctcttgggacctagtctctgccttctactctctacccctggcccccctcagccctacaagtgtccctatatcccctgtcagtgtggggaggggcccggaccctgatgctcatgtggctgttgacctgtcccggtatgaaggc

SEQ ID NO: 38 - protein, 441 aa, Artificial Sequence [sequence omitted]

SEQ ID NO: 39 - DNA, 918 bp, Artificial Sequence
  tPA-myc-FGFR-2
atggatgcaatgaagagagggctctgctgtgtgctgctgctgtgtggagcagtcttcgtttcgcccagccaggaaatccatgcccgattcagaagaggagccagagaacaaaaactcatctcagaagaggatctgctcgagccctccttcagtttagttgaggatatcacattagagccagaaggagcaccatactggaccaacacagaaaagatggaaaagcggctccatgctgtgcctgcggccaacactgtcaagtttcgctgcccagccggggggaacccaatgccaaccatgcggtggctgaaaaacgggaaggagtttaagcaggagcatcgcattggaggctacaaggtacgaaaccagcactggagcctcattatggaaagtgtggtcccatctgacaagggaaattatacctgtgtggtggagaatgaatacgggtccatcaatcacacgtaccacctggatgttgtggagcgatcgcctcaccggcccatcctccaagccggactgccggcaaacgcctccacagtggtcggaggagacgtagagtttgtctgcaaggtttacagtgatgcccagccccacatccagtggatcaagcacgtggaaaagaacggcagtaaatacgggcccgacgggctgccctacctcaaggttctcaaggccgccggtgttaacaccacggacaaagagattgaggttctctatattcggaatgtaacttttgaggacgctggggaatatacgtgcttggcgggtaattctattgggatatcctttcactccgcatggttgacagttctgccaggtatatactgttctttctctctgggtttttttcctttttcttggttgactgctataaaattaacacagcttctgttatcagaaatggccccttttatccttgca

SEQ ID NO: 40 - protein, 306 aa, Artificial Sequence
  tPA-myc-FGFR-2
MDAMKRGLCCVLLLCGAVFVSPSQEIHARFRRGAREQKLISEEDLLEPSFSLVEDITLEPEGAPYWTNTEKMEKRLHAVPAANTVKFRCPAGGNPMPTMRWLKNGKEFKQEHRIGGYKVRNQHWSLIMESVVPSDKGNYTCVVENEYGSINHTYHLDVVERSPHRPILQAGLPANASTVVGGDVEFVCKVYSDAQPHIQWIKHVEKNGSKYGPDGLPYLKVLKAAGVNTTDKEIEVLYIRNVTFEDAGEYTCLAGNSIGISFHSAWLTVLPGIYCSFSLGFFPFSWLTAIKLTQLLLSEMAPFILA

SEQ ID NO: 41 - DNA, 1404 bp, Artificial Sequence
  tPA-myc-FGFR-4
atggatgcaatgaagagagggctctgctgtgtgctgctgctgtgtggagcagtcttcgtttcgcccagccaggaaatccatgcccgattcagaagaggagccagagaacaaaaactcatctcagaagaggatctgctcgaggaggaagtggagcttgagccctgcctggctcccagcctggagcagcaagagcaggagctgacagtagcccttgggcagcctgtgcggctgtgctgtgggcgggctgagcgtggtggccactggtacaaggagggcagtcgcctggcacctgctggccgtgtacggggctggaggggccgcctagagattgccagcttcctacctgaggatgctggccgctacctctgcctggcacgaggctccatgatcgtcctgcagaatctcaccttgattacaggtgactccttgacctccagcaacgatgatgaggaccccaagtcccatagggacccctcgaataggcacagttacccccagcaagcaccctactggacacacccccagcgcatggagaagaaactgcatgcagtacctgcggggaacaccgtcaagttccgctgtccagctgcaggcaaccccacgcccaccatccgctggcttaaggatggacaggcctttcatggggagaaccgcattggaggcattcggctgcgccatcagcactggagtctcgtgatggagagcgtggtgccctcggaccgcggcacatacacctgcctggtagagaacgctgtgggcagcatctgctataactacctgctagatgtgctggagcggtccccgcaccggcccatcctgcaggccgggctcccggccaacaccacagccgtggtgggcagcgacgtggagctgctgtgcaaggtgtacagcgatgcccagccccacatccagtggctgaagcacatcgtcatcaacggcagcagcttcggagccgacggtttcccctatgtgcaagtcctaaagactgcagacatcaatagctcagaggtggaggtcctgtacctgcggaacgtgtcagccgaggacgcaggcgagtacacctgcctcgcaggcaattccatcggcctctcctaccagtctgcctggctcacggtgctgccaggtgagcacctgaagggccaggagatgctgcgagatgcccctctgggccagcagtgggggctgtggcctgttgggtggtcagtctctgttggcctgtggggtctggcctggggggcagtgtgtggatttgtgggtttgagctgtatgacagcccctctgtgcctctccacacgtggccgtccatgtgaccgtctgctgaggtgtgggtgcctgggactgggcataactacagcttcctccgtgtgtgtccccacatatgttgggagctgggagggactgagt

SEQ ID NO: 42 - protein, 468 aa, Artificial Sequence
  tPA-myc-FGFR-4
MDAMKRGLCCVLLLCGAVFVSPSQEIHARFRRGAREQKLISEEDLLEEEVELEPCLAPSLEQQEQELTVALGQPVRLCCGRAERGGHWYKEGSRLAPAGRVRGWRGRLEIASFLPEDAGRYLCLARGSMIVLQNLTLITGDSLTSSNDDEDPKSHRDPSNRHSYPQQAPYWTHPQRMEKKLHAVPAGNTVKFRCPAAGNPTPTIRWLKDGQAFHGENRIGGIRLRHQHWSLVMESVVPSDRGTYTCLVENAVGSICYNYLLDVLERSPHRPILQAGLPANTTAVVGSDVELLCKVYSDAQPHIQWLKHIVINGSSFGADGFPYVQVLKTADINSSEVEVLYLRNVSAEDAGEYTCLAGNSIGLSYQSAWLTVLPGEHLKGQEMLRDAPLGQQWGLWPVGWSVSVGLWGLAWGAVCGFVGLSCMTAPLCLSTRGRPCDRLLRCGCLGLGITTASSVCVPTYVGSWEGLS

SEQ ID NO: 43 - DNA, 870 bp, Artificial Sequence
  tPA-myc-RAGE
atggatgcaatgaagagagggctctgctgtgtgctgctgctgtgtggagcagtcttcgtttcgcccagccaggaaatccatgcccgattcagaagaggagccagagaacaaaaactcatctcagaagaggatctgctcgagcaaaacatcacagcccggattggcgagccactggtgctgaagtgtaagggggcccccaagaaaccaccccagcggctggaatggaaactgaacacaggccggacagaagcttggaaggtcctgtctccccagggaggaggcccctgggacagtgtggctcgtgtccttcccaacggctccctcttccttccggctgtcgggatccaggatgaggggattttccggtgccaggcaatgaacaggaatggaaaggagaccaagtccaactaccgagtccgtgtctaccagatccctgggaagccagaaattgtagattctgcctctgaactcacggctggtgttcccaataaggtagtggaagaaagcaggagaagtagaaaacggccctgtgaacaggaggtggggacatgtgtgtcagagggaagctaccctgcagggactcttagctggcacttggatgggaagcccctggtgcctaatgagaagggagtatctgtgaaggaacagaccaggagacaccctgagacagggctcttcacactgcagtcggagctaatggtgaccccagcccggggaggagatccccgtcccaccttctcctgtagcttcagcccaggccttccccgacaccgggccttgcgcacagcccccatccagccccgtgtctggggtgagcataggtggggagggccccaagctcacgtgagcacgttctggaagtctgaccct

SEQ ID NO: 44 - protein, 290 aa, Artificial Sequence
  tPA-myc-RAGE
MDAMKRGLCCVLLLCGAVFVSPSQEIHARFRRGAREQKLISEEDLLEQNITARIGEPLVLKCKGAPKKPPQRLEWKLNTGRTEAWKVLSPQGGGPWDSVARVLPNGSLFLPAVGIQDEGIFRCQAMNRNGKETKSNYRVRVYQIPGKPEIVDSASELTAGVPNKVVEESRRSRKRPCEQEVGTCVSEGSYPAGTLSWHLDGKPLVPNEKGVSVKEQTRRHPETGLFTLQSELMVTPARGGDPRPTFSCSFSPGLPRHRALRTAPIQPRVWGEHRWGGPQAHVSTFWKSDP

SEQ ID NO: 45 - DNA, 1185 bp, Artificial Sequence
  tPA-myc-TEK
atggatgcaatgaagagagggctctgctgtgtgctgctgctgtgtggagcagtcttcgtttcgcccagccaggaaatccatgcccgattcagaagaggagccagagaacaaaaactcatctcagaagaggatctgctcgaggtggaaggtgccatggacttgatcttgatcaattccctacctcttgtatctgatgctgaaacatctctcacctgcattgcctctgggtggcgcccccatgagcccatcaccataggaagggactttgaagccttaatgaaccagcaccaggatccgctggaagttactcaagatgtgaccagagaatgggctaaaaaagttgtttggaagagagaaaaggctagtaagatcaatggtgcttatttctgtgaagggcgagttcgaggagaggcaatcaggatacgaaccatgaagatgcgtcaacaagcttccttcctaccagctactttaactatgactgtggacaagggagatcacgtgaacatatctttcaaaaaggtattgattaaagaagaagatgcagcgatttacaaaaatggttccttcatccattcagtgccccggcatgaagtacctgatattctagaagtacacctgcctcatgctcagccccaggatgctggagtgtactcggccaggtatgtaggaggaaacctcttcacctcggccttcaccaggctgatagtccggagatgtgaagcccagaagtggggacctgaatgcaaccatctctgtactgcttgtatgaacaatggtgtctgccatgaagatactggagaatgcatttgccctcctgggtttatgggaaggacgtgtgagaaggcttgtgaactgcacacgtttggcagaacttgtaaagaaaggtgcagtggacaagagggatgcaagtcttatgtgttctgtctccctgacccctatgggtgttcctgtgccgcaggctggaagggtctgcagtgcaatgaagcatgccaccctggtttttacgggccagattgtaagcttaggtgcagctgcaacaatggggagatgtgtgatcgcttccaaggatgtctctgctctccaggatggcaggggctccagtgtgagagagaaggtaaagcaaggcataccgaggatgaccccaaagatagtggatttgccagatcatatagaagtaaacagtgg

SEQ ID NO: 46 - protein, 395 aa, Artificial Sequence
  tPA-myc-TEK
MDAMKRGLCCVLLLCGAVFVSPSQEIHARFRRGAREQKLISEEDLLEVEGAMDLILINSLPLVSDAETSLTCIASGWRPHEPITIGRDFEALMNQHQDPLEVTQDVTREWAKKVVWKREKASKINGAYFCEGRVRGEAIRIRTMKMRQQASFLPATLTMTVDKGDHVNISFKKVLIKEEDAAIYKNGSFIHSVPRHEVPDILEVHLPHAQPQDAGVYSARYVGGNLFTSAFTRLIVRRCEAQKWGPECNHLCTACMNNGVCHEDTGECICPPGFMGRTCEKACELHTFGRTCKERCSGQEGCKSYVFCLPDPYGCSCAAGWKGLQCNEACHPGFYGPDCKLRCSCNNGEMCDRFQGCLCSPGWQGLQCEREGKARHTEDDPKDSGFARSYRSKQW

SEQ ID NO: 47 - DNA, 2790 bp, Artificial Sequence
  tPA-myc-RON
atggatgcaatgaagagagggctctgctgtgtgctgctgctgtgtggagcagtcttcgtttcgcccagccaggaaatccatgcccgattcagaagaggagccagagaacaaaaactcatctcagaagaggatctgctcgaggactggcagtgcccgcgcaccccctacgcggcctctcgcgactttgacgtgaagtacgtggtgcccagcttctccgccggaggcctggtacaggccatggtgacctacgagggcgacagaaatgagagtgctgtgtttgtagccatacgcaatcgcctgcatgtgcttgggcctgacctgaagtctgtccagagcctggccacgggccctgctggagaccctggctgccagacgtgtgcagcctgtggcccaggaccccacggccctcccggtgacacagacacaaaggtgctggtgctggatcccgcgctgcctgcgctggtcagttgtggctccagcctgcagggccgctgcttcctgcatgacctagagccccaagggacagccgtgcatctggcagcgccagcctgccttttctcagcccaccataaccggcccgatgactgccccgactgtgtggccagcccattgggcacccgtgtaactgtggttgagcaaggccaggcctcctatttctacgtggcatcctcactggacgcagccgtggctgccagcttcagcccacgctcagtgtctatcaggcgtctcaaggctgacgcctcgggattcgcaccgggctttgtggcgttgtcagtgctgcccaagcatcttgtctcctacagtattgaatacgtgcacagcttccacacgggagccttcgtatacttcctgactgtacagccggccagcgtgacagatgatcctagtgccctgcacacacgcctggcacggcttagcgccactgagccagagttgggtgactatcgggagctggtcctcgactgcagatttgctccaaaacgcaggcgccggggggccccagaaggcggacagccctaccctgtgctgcgggtggcccactccgctccagtgggtgcccaacttgccactgagctgagcatcgccgagggccaggaagtactatttggggtctttgtgactggcaaggatggtggtcctggcgtgggccccaactctgtcgtctgtgccttccccattgacctgctggacacactaattgatgagggtgtggagcgctgttgtgaatccccagtccatccaggcctccggcgaggcctcgacttcttccagtcgcccagtttttgccccaacccgcctggcctggaagccctcagccccaacaccagctgccgccacttccctctgctggtcagtagcagcttctcacgtgtggacctattcaatgggctgttgggaccagtacaggtcactgcattgtatgtgacacgccttgacaacgtcacagtggcacacatgggcacaatggatgggcgtatcctgcaggtggagctggtcaggtcactaaactacttgctgtatgtgtccaacttctcactgggtgacagtgggcagcccgtgcagcgggatgtcagtcgtcttggggaccacctactctttgcctctggggaccaggttttccaggtacctatccaaggccctggctgccgccacttcctgacctgtgggcgttgcctaagggcatggcatttcatgggctgtggctggtgtgggaacatgtgcggccagcagaaggagtgtcctggctcctggcaacaggaccactgcccacctaagcttactgagttccacccccacagtggacctctaaggggcagtacaaggctgaccctgtgtggctccaacttctaccttcacccttctggtctggtgcctgagggaacccatcaggtcactgtgggccaaagtccctgccggccactgcccaaggacagctcaaaactcagaccagtgccccggaaagactttgtagaggagtttgagtgtgaactggagcccttgggcacccaggcagtggggcctaccaacgtcagcctcaccgtgactaacatgccaccgggcaagcacttccgggtagacggcacctccgtgctgagaggcttctctttcatggagccagtgctgatagcagtgcaacccctctttggcccacgggcaggaggcacctgtctcactcttgaaggccagagtctgtctgtaggcaccagccgggctgtgctggtcaatgggactgagtgtctgctagcacgggtcagtgaggggcagcttttatgtgccacaccccctggggccacggtggccagtgtcccccttagcctgcaggtggggggtgcccaggtacctggttcctggaccttccagtacagagaagaccctgtcgtgctaagcatcagccccaactgtggctacatcaactcccacatcaccatctgtggccagcatctaacttcagcatggcacttagtgctgtcattccatgacgggcttagggcagtggaaagcaggcagtgtgagaggcagcttccagagcagcagctgtgccgccttcctgaatatgtggtccgagacccccagggatgggtggcagggaatctgagtgcccgaggggatggagctgctggctttacactgcctggctttcgcttcctacccccaccccatccacccagtgccaacctagttccactgaagcctgaggagcatgccattaagtttgaggtaagtgtaagggataggggcagggacagttggggatctgaaagtaggggccagcctactggctggtcctca

SEQ ID NO: 48 - protein, 930 aa, Artificial Sequence
  tPA-myc-RON
MDAMKRGLCCVLLLCGAVFVSPSQEIHARFRRGAREQKLISEEDLLEDWQCPRTPYAASRDFDVKYVVPSFSAGGLVQAMVTYEGDRNESAVFVAIRNRLHVLGPDLKSVQSLATGPAGDPGCQTCAACGPGPHGPPGDTDTKVLVLDPALPALVSCGSSLQGRCFLHDLEPQGTAVHLAAPACLFSAHHNRPDDCPDCVASPLGTRVTVVEQGQASYFYVASSLDAAVAASFSPRSVSIRRLKADASGFAPGFVALSVLPKHLVSYSIEYVHSFHTGAFVYFLTVQPASVTDDPSALHTRLARLSATEPELGDYRELVLDCRFAPKRRRRGAPEGGQPYPVLRVAHSAPVGAQLATELSIAEGQEVLFGVFVTGKDGGPGVGPNSVVCAFPIDLLDTLIDEGVERCCESPVHPGLRRGLDFFQSPSFCPNPPGLEALSPNTSCRHFPLLVSSSFSRVDLFNGLLGPVQVTALYVTRLDNVTVAHMGTMDGRILQVELVRSLNYLLYVSNFSLGDSGQPVQRDVSRLGDHLLFASGDQVFQVPIQGPGCRHFLTCGRCLRAWHFMGCGWCGNMCGQQKECPGSWQQDHCPPKLTEFHPHSGPLRGSTRLTLCGSNFYLHPSGLVPEGTHQVTVGQSPCRPLPKDSSKLRPVPRKDFVEEFECELEPLGTQAVGPTNVSLTVTNMPPGKHFRVDGTSVLRGFSFMEPVLIAVQPLFGPRAGGTCLTLEGQSLSVGTSRAVLVNGTECLLARVSEGQLLCATPPGATVASVPLSLQVGGAQVPGSWTFQYREDPVVLSISPNCGYINSHITICGQHLTSAWHLVLSFHDGLRAVESRQCERQLPEQQLCRLPEYVVRDPQGWVAGNLSARGDGAAGFTLPGFRFLPPPHPPSANLVPLKPEEHAIKFEVSVRDRGRDSWGSESRGQPTGWSS

SEQ ID NO: 49 - DNA, 3851 bp, Artificial Sequence
  pDrive cloning vector
gcgcccaatacgcaaaccgcctctccccgcgcgttggccgattcattaatgcagctggcacgacaggtttcccgactggaaagcgggcagtgagcgcaacgcaattaatgtgagttagctcactcattaggcaccccaggctttacactttatgcttccggctcgtatgttgtgtggaattgtgagcggataacaatttcacacaggaaacagctatgaccatgattacgccaagctctaatacgactcactatagggaaagctcggtaccacgcatgctgcagacgcgttacgtatcggatccagaattcgtgatatctgaattcgtcgacaagcttctcgagcctaggctagctctagaccacacgtgtgggggcccgagctcgcggccgctgtattctatagtgtcacctaaatggccgcacaattcactggccgtcgttttacaacgtcgtgactgggaaaaccctggcgttacccaacttaatcgccttgcagcacatccccctttcgccagctggcgtaatagcgaagaggcccgcaccgatcgcccttcccaacagttgcgcagcctgaatggcgaatggaaattgtaagcgttaatattttgttaaaattcgcgttaaatttttgttaaatcagctcattttttaaccaataggccgaaatcggcaaaatcccttataaatcaaaagaatagaccgagatagggttgagtgttgttccagtttggaacaagagtccactattaaagaacgtggactccaacgtcaaagggcgaaaaaccgtctatcagggcgatggcccactacgtgaaccatcaccctaatcaagttttttggggtcgaggtgccgtaaagcactaaatcggaaccctaaagggagcccccgatttagagcttgacggggaaagccggcgaacgtggcgagaaaggaagggaagaaagcgaaaggagcgggcgctagggcgctggcaagtgtagcggtcacgctgcgcgtaaccaccacacccgccgcgcttaatgcgccgctacagggcgcgtcaggtggcacttttcggggaaatgtgcgcggaacccctatttgtttatttttctaaatacattcaaatatgtatccgctcatgagacaataaccctgataaatgcttcaataatattgaaaaaggaagagtatgagtattcaacatttccgtgtcgcccttattcccttttttgcggcattttgccttcctgtttttgctcacccagaaacgctggtgaaagtaaaagatgctgaagatcagttgggtgcacgagtgggttacatcgaactggatctcaacagcggtaagatccttgagagttttcgccccgaagaacgttttccaatgatgagcacttttaaagttctgctatgtggcgcggtattatcccgtattgacgccgggcaagagcaactcggtcgccgcatacactattctcagaatgacttggttgagtactcaccagtcacagaaaagcatcttacggatggcatgacagtaagagaattatgcagtgctgccataaccatgagtgataacactgcggccaacttacttctgacaacgatcggaggaccgaaggagctaaccgcttttttgcacaacatgggggatcatgtaactcgccttgatcgttgggaaccggagctgaatgaagccataccaaacgacgagcgtgacaccacgatgcctgtagcaatggcaacaacgttgcgcaaactattaactggcgaactacttactctagcttcccggcaacaattaatagactggatggaggcggataaagttgcaggaccacttctgcgctcggcccttccggctggctggtttattgctgataaatctggagccggtgagcgtgggtctcgcggtatcattgcagcactggggccagatggtaagccctcccgtatcgtagttatctacacgacggggagtcaggcaactatggatgaacgaaatagacagatcgctgagataggtgcctcactgattaagcattggtaactgtcagaccaagtttactcatatatactttagattgatttaaaacttcatttttaatttaaaaggatctaggtgaagatcctttttgataatctcatgaacaataaaactgtctgcttacataaacagtaatacaaggggtgttatgagccatattcaacgggaaacgtcttgctctaggccgcgattaaattccaacatggatgctgatttatatgggtataaatgggctcgcgataatgtcgggcaatcaggtgcgacaatctatcgattgtatgggaagcccgatgcgccagagttgtttctgaaacatggcaaaggtagcgttgccaatgatgttacagatgagatggtcagactaaactggctgacggaatttatgcctcttccgaccatcaagcattttatccgtactcctgatgatgcatggttactcaccactgcgatccccgggaaaacagcattccaggtattagaagaatatcctgattcaggtgaaaatattgttgatgcgctggcagtgttcctgcgccggttgcattcgattcctgtttgtaattgtccttttaacagcgatcgcgtatttcgtctcgctcaggcgcaatcacgaatgaataacggtttggttgatgcgagtgattttgatgacgagcgtaatggctggcctgttgaacaagtctggaaagaaatgcataaacttttgccattctcaccggattcagtcgtcactcatggtgatttctcacttgataaccttatttttgacgaggggaaattaataggttgtattgatgttggacgagtcggaatcgcagaccgataccaggatcttgccatcctatggaactgcctcggtgagttttctccttcattacagaaacggctttttcaaaaatatggtattgataatcctgatatgaataaattgcagtttcatttgatgctcgatgagtttttctaagaattaattcatgaccaaaatcccttaacgtgagttttcgttccactgagcgtcagaccccgtagaaaagatcaaaggatcttcttgagatcctttttttctgcgcgtaatctgctgcttgcaaacaaaaaaaccaccgctaccagcggtggtttgtttgccggatcaagagctaccaactctttttccgaaggtaactggcttcagcagagcgcagataccaaatactgtccttctagtgtagccgtagttaggccaccacttcaagaactctgtagcaccgcctacatacctcgctctgctaatcctgttaccagtggctgctgccagtggcgataagtcgtgtcttaccgggttggactcaagacgatagttaccggataaggcgcagcggtcgggctgaacggggggttcgtgcacacagcccagcttggagcgaacgacctacaccgaactgagatacctacagcgtgagctatgagaaagcgccacgcttcccgaagggagaaaggcggacaggtatccggtaagcggcagggtcggaacaggagagcgcacgagggagcttccagggggaaacgcctggtatctttatagtcctgtcgggtttcgccacctctgacttgagcgtcgatttttgtgatgctcgtcaggggggcggagcctatggaaaaacgccagcaacgcggcctttttacggttcctggccttttgctggccttttgctcacatgttctttcctgcgttatcccctgattctgtggataaccgtattaccgcctttgagtgagctgataccgctcgccgcagccgaacgaccgagcgcagcgagtcagtgagcgaggaagcggaaga

SEQ ID NO: 50 - DNA, 4006 bp, Artificial Sequence
  pCI expression vector
tcaatattggccattagccatattattcattggttatatagcataaatcaatattggctattggccattgcatacgttgtatctatatcataatatgtacatttatattggctcatgtccaatatgaccgccatgttggcattgattattgactagttattaatagtaatcaattacggggtcattagttcatagcccatatatggagttccgcgttacataacttacggtaaatggcccgcctggctgaccgcccaacgacccccgcccattgacgtcaataatgacgtatgttcccatagtaacgccaatagggactttccattgacgtcaatgggtggagtatttacggtaaactgcccacttggcagtacatcaagtgtatcatatgccaagtccgccccctattgacgtcaatgacggtaaatggcccgcctggcattatgcccagtacatgaccttacgggactttcctacttggcagtacatctacgtattagtcatcgctattaccatggtgatgcggttttggcagtacaccaatgggcgtggatagcggtttgactcacggggatttccaagtctccaccccattgacgtcaatgggagtttgttttggcaccaaaatcaacgggactttccaaaatgtcgtaataaccccgccccgttgacgcaaatgggcggtaggcgtgtacggtgggaggtctatataagcagagctcgtttagtgaaccgtcagatcactagaagctttattgcggtagtttatcacagttaaattgctaacgcagtcagtgcttctgacacaacagtctcgaacttaagctgcagaagttggtcgtgaggcactgggcaggtaagtatcaaggttacaagacaggtttaaggagaccaatagaaactgggcttgtcgagacagagaagactcttgcgtttctgataggcacctattggtcttactgacatccactttgcctttctctccacaggtgtccactcccagttcaattacagctcttaaggctagagtacttaatacgactcactataggctagcctcgagaattcacgcgtggtacctctagagtcgacccgggcggccgcttcgagcagacatgataagatacattgatgagtttggacaaaccacaactagaatgcagtgaaaaaaatgctttatttgtgaaatttgtgatgctattgctttatttgtaaccattataagctgcaataaacaagttaacaacaacaattgcattcattttatgtttcaggttcagggggagatgtgggaggttttttaaagcaagtaaaacctctacaaatgtggtaaaatcgataaggatccgggctggcgtaatagcgaagaggcccgcaccgatcgcccttcccaacagttgcgcagcctgaatggcgaatggacgcgccctgtagcggcgcattaagcgcggcgggtgtggtggttacgcgcagcgtgaccgctacacttgccagcgccctagcgcccgctcctttcgctttcttcccttcctttctcgccacgttcgccggctttccccgtcaagctctaaatcgggggctccctttagggttccgatttagtgctttacggcacctcgaccccaaaaaacttgattagggtgatggttcacgtagtgggccatcgccctgatagacggtttttcgccctttgacgttggagtccacgttctttaatagtggactcttgttccaaactggaacaacactcaaccctatctcggtctattcttttgatttataagggattttgccgatttcggcctattggttaaaaaatgagctgatttaacaaaaatttaacgcgaattttaacaaaatattaacgcttacaatttcctgatgcggtattttctccttacgcatctgtgcggtatttcacaccgcatatggtgcactctcagtacaatctgctctgatgccgcatagttaagccagccccgacacccgccaacacccgctgacgcgccctgacgggcttgtctgctcccggcatccgcttacagacaagctgtgaccgtctccgggagctgcatgtgtcagaggttttcaccgtcatcaccgaaacgcgcgagacgaaagggcctcgtgatacgcctatttttataggttaatgtcatgataataatggtttcttagacgtcaggtggcacttttcggggaaatgtgcgcggaacccctatttgtttatttttctaaatacattcaaatatgtatccgctcatgagacaataaccctgataaatgcttcaataatattgaaaaaggaagagtatgagtattcaacatttccgtgtcgcccttattcccttttttgcggcattttgccttcctgtttttgctcacccagaaacgctggtgaaagtaaaagatgctgaagatcagttgggtgcacgagtgggttacatcgaactggatctcaacagcggtaagatccttgagagttttcgccccgaagaacgttttccaatgatgagcacttttaaagttctgctatgtggcgcggtattatcccgtattgacgccgggcaagagcaactcggtcgccgcatacactattctcagaatgacttggttgagtactcaccagtcacagaaaagcatcttacggatggcatgacagtaagagaattatgcagtgctgccataaccatgagtgataacactgcggccaacttacttctgacaacgatcggaggaccgaaggagctaaccgcttttttgcacaacatgggggatcatgtaactcgccttgatcgttgggaaccggagctgaatgaagccataccaaacgacgagcgtgacaccacgatgcctgtagcaatggcaacaacgttgcgcaaactattaactggcgaactacttactctagcttcccggcaacaattaatagactggatggaggcggataaagttgcaggaccacttctgcgctcggcccttccggctggctggtttattgctgataaatctggagccggtgagcgtgggtctcgcggtatcattgcagcactggggccagatggtaagccctcccgtatcgtagttatctacacgacggggagtcaggcaactatggatgaacgaaatagacagatcgctgagataggtgcctcactgattaagcattggtaactgtcagaccaagtttactcatatatactttagattgatttaaaacttcatttttaatttaaaaggatctaggtgaagatcctttttgataatctcatgaccaaaatcccttaacgtgagttttcgttccactgagcgtcagaccccgtagaaaagatcaaaggatcttcttgagatcctttttttctgcgcgtaatctgctgcttgcaaacaaaaaaaccaccgctaccagcggtggtttgtttgccggatcaagagctaccaactctttttccgaaggtaactggcttcagcagagcgcagataccaaatactgttcttctagtgtagccgtagttaggccaccacttcaagaactctgtagcaccgcctacatacctcgctctgctaatcctgttaccagtggctgctgccagtggcgataagtcgtgtcttaccgggttggactcaagacgatagttaccggataaggcgcagcggtcgggctgaacggggggttcgtgcacacagcccagcttggagcgaacgacctacaccgaactgagatacctacagcgtgagctatgagaaagcgccacgcttcccgaagggagaaaggcggacaggtatccggtaagcggcagggtcggaacaggagagcgcacgagggagcttccagggggaaacgcctggtatctttatagtcctgtcgggtttcgccacctctgacttgagcgtcgatttttgtgatgctcgtcaggggggcggagcctatggaaaaacgccagcaacgcggcctttttacggttcctggccttttgctggccttttgctcacatggctcgacagatct

SEQ ID NO: 51 - DNA, 5446 bp, Artificial Sequence
  pcDNA 3.1 expression vector
gacggatcgggagatctcccgatcccctatggtcgactctcagtacaatctgctctgatgccgcatagttaagccagtatctgctccctgcttgtgtgttggaggtcgctgagtagtgcgcgagcaaaatttaagctacaacaaggcaaggcttgaccgacaattgcatgaagaatctgcttagggttaggcgttttgcgctgcttcgcgatgtacgggccagatatacgcgttgacattgattattgactagttattaatagtaatcaattacggggtcattagttcatagcccatatatggagttccgcgttacataacttacggtaaatggcccgcctggctgaccgcccaacgacccccgcccattgacgtcaataatgacgtatgttcccatagtaacgccaatagggactttccattgacgtcaatgggtggactatttacggtaaactgcccacttggcagtacatcaagtgtatcatatgccaagtacgccccctattgacgtcaatgacggtaaatggcccgcctggcattatgcccagtacatgaccttatgggactttcctacttggcagtacatctacgtattagtcatcgctattaccatggtgatgcggttttggcagtacatcaatgggcgtggatagcggtttgactcacggggatttccaagtctccaccccattgacgtcaatgggagtttgttttggcaccaaaatcaacgggactttccaaaatgtcgtaacaactccgccccattgacgcaaatgggcggtaggcgtgtacggtgggaggtctatataagcagagctctctggctaactagagaacccactgcttactggcttatcgaaattaatacgactcactatagggagacccaagcttggtaccgagctcggatccactagtaacggccgccagtgtgctggaattctgcagatatccatcacactggcggccgctcgagcatgcatctagagggccctattctatagtgtcacctaaatgctagagctcgctgatcagcctcgactgtgccttctagttgccagccatctgttgtttgcccctcccccgtgccttccttgaccctggaaggtgccactcccactgtcctttcctaataaaatgaggaaattgcatcgcattgtctgagtaggtgtcattctattctggggggtggggtggggcaggacagcaagggggaggattgggaagacaatagcaggcatgctggggatgcggtgggctctatggcttctgaggcggaaagaaccagctggggctctagggggtatccccacgcgccctgtagcggcgcattaagcgcggcgggtgtggtggttacgcgcagcgtgaccgctacacttgccagcgccctagcgcccgctcctttcgctttcttcccttcctttctcgccacgttcgccggctttccccgtcaagctctaaatcggggcatccctttagggttccgatttagtgctttacggcacctcgaccccaaaaaacttgattagggtgatggttcacgtagtgggccatcgccctgatagacggtttttcgccctttgacgttggagtccacgttctttaatagtggactcttgttccaaactggaacaacactcaaccctatctcggtctattcttttgatttataagggattttggggatttcggcctattggttaaaaaatgagctgatttaacaaaaatttaacgcgaattaattctgtggaatgtgtgtcagttagggtgtggaaagtccccaggctccccaggcaggcagaagtatgcaaagcatgcatctcaattagtcagcaaccaggtgtggaaagtccccaggctccccagcaggcagaagtatgcaaagcatgcatctcaattagtcagcaaccatagtcccgcccctaactccgcccatcccgcccctaactccgcccagttccgcccattctccgccccatggctgactaattttttttatttatgcagaggccgaggccgcctctgcctctgagctattccagaagtagtgaggaggcttttttggaggcctaggcttttgcaaaaagctcccgggagcttgtatatccattttcggatctgatcaagagacaggatgaggatcgtttcgcatgattgaacaagatggattgcacgcaggttctccggccgcttgggtggagaggctattcggctatgactgggcacaacagacaatcggctgctctgatgccgccgtgttccggctgtcagcgcaggggcgcccggttctttttgtcaagaccgacctgtccggtgccctgaatgaactgcaggacgaggcagcgcggctatcgtggctggccacgacgggcgttccttgcgcagctgtgctcgacgttgtcactgaagcgggaagggactggctgctattgggcgaagtgccggggcaggatctcctgtcatctcaccttgctcctgccgagaaagtatccatcatggctgatgcaatgcggcggctgcatacgcttgatccggctacctgcccattcgaccaccaagcgaaacatcgcatcgagcgagcacgtactcggatggaagccggtcttgtcgatcaggatgatctggacgaagagcatcaggggctcgcgccagccgaactgttcgccaggctcaaggcgcgcatgcccgacggcgaggatctcgtcgtgacccatggcgatgcctgcttgccgaatatcatggtggaaaatggccgcttttctggattcatcgactgtggccggctgggtgtggcggaccgctatcaggacatagcgttggctacccgtgatattgctgaagagcttggcggcgaatgggctgaccgcttcctcgtgctttacggtatcgccgctcccgattcgcagcgcatcgccttctatcgccttcttgacgagttcttctgagcgggactctggggttcgaaatgaccgaccaagcgacgcccaacctgccatcacgagatttcgattccaccgccgccttctatgaaaggttgggcttcggaatcgttttccgggacgccggctggatgatcctccagcgcggggatctcatgctggagttcttcgcccaccccaacttgtttattgcagcttataatggttacaaataaagcaatagcatcacaaatttcacaaataaagcatttttttcactgcattctagttgtggtttgtccaaactcatcaatgtatcttatcatgtctgtataccgtcgacctctagctagagcttggcgtaatcatggtcatagctgtttcctgtgtgaaattgttatccgctcacaattccacacaacatacgagccggaagcataaagtgtaaagcctggggtgcctaatgagtgagctaactcacattaattgcgttgcgctcactgcccgctttccagtcgggaaacctgtcgtgccagctgcattaatgaatcggccaacgcgcggggagaggcggtttgcgtattgggcgctcttccgcttcctcgctcactgactcgctgcgctcggtcgttcggctgcggcgagcggtatcagctcactcaaaggcggtaatacggttatccacagaatcaggggataacgcaggaaagaacatgtgagcaaaaggccagcaaaaggccaggaaccgtaaaaaggccgcgttgctggcgtttttccataggctccgcccccctgacgagcatcacaaaaatcgacgctcaagtcagaggtggcgaaacccgacaggactataaagataccaggcgtttccccctggaagctccctcgtgcgctctcctgttccgaccctgccgcttaccggatacctgtccgcctttctcccttcgggaagcgtggcgctttctcaatgctcacgctgtaggtatctcagttcggtgtaggtcgttcgctccaagctgggctgtgtgcacgaaccccccgttcagcccgaccgctgcgccttatccggtaactatcgtcttgagtccaacccggtaagacacgacttatcgccactggcagcagccactggtaacaggattagcagagcgaggtatgtaggcggtgctacagagttcttgaagtggtggcctaactacggctacactagaaggacagtatttggtatctgcgctctgctgaagccagttaccttcggaaaaagagttggtagctcttgatccggcaaacaaaccaccgctggtagcggtggtttttttgtttgcaagcagcagattacgcgcagaaaaaaaggatctcaagaagatcctttgatcttttctacggggtctgacgctcagtggaacgaaaactcacgttaagggattttggtcatgagattatcaaaaaggatcttcacctagatccttttaaattaaaaatgaagttttaaatcaatctaaagtatatatgagtaaacttggtctgacagttaccaatgcttaatcagtgaggcacctatctcagcgatctgtctatttcgttcatccatagttgcctgactccccgtcgtgtagataactacgatacgggagggcttaccatctggccccagtgctgcaatgataccgcgagacccacgctcaccggctccagatttatcagcaataaaccagccagccggaagggccgagcgcagaagtggtcctgcaactttatccgcctccatccagtctattaattgttgccgggaagctagagtaagtagttcgccagttaatagtttgcgcaacgttgttgccattgctacaggcatcgtggtgtcacgctcgtcgtttggtatggcttcattcagctccggttcccaacgatcaaggcgagttacatgatcccccatgttgtgcaaaaaagcggttagctccttcggtcctccgatcgttgtcagaagtaagttggccgcagtgttatcactcatggttatggcagcactgcataattctcttactgtcatgccatccgtaagatgcttttctgtgactggtgagtactcaaccaagtcattctgagaatagtgtatgcggcgaccgagttgctcttgcccggcgtcaatacgggataataccgcgccacatagcagaactttaaaagtgctcatcattggaaaacgttcttcggggcgaaaactctcaaggatcttaccgctgttgagatccagttcgatgtaacccactcgtgcacccaactgatcttcagcatcttttactttcaccagcgtttctgggtgagcaaaaacaggaaggcaaaatgccgcaaaaaagggaataagggcgacacggaaatgttgaatactcatactcttcctttttcaatattattgaagcatttatcagggttattgtctcatgagcggatacatatttgaatgtatttagaaaaataaacaaataggggttccgcgcacatttccccgaaaagtgccacctgacgtc

SEQ ID NO: 52 - protein, 32 aa, Mus musculus
  tPA pro
MKRELLCVLLLCGLAFPLPDQGIHGRFRRGAR

SEQ ID NO: 53 - protein, 32 aa, Rattus norvegicus
  tPA pro
MKGELLCVLLLCGVAFTLPDQGIHRRFRRGAR

SEQ ID NO: 54 - protein, 36 aa, Bos taurus
  tPA pro
MMSAMKTEFLCVLLLCGAVFTSPSQETYRRLRRGAR

SEQ ID NO: 55 - protein, 35 aa, Pongo pygmaeus
  tPA pro
MNAMKRGLCCVLLLCGAVFALPSQEIHARVRRGAR

SEQ ID NO: 56 - protein, 35 aa, Sus scrofa
  tPA pro
MYALKRELWCVLLLCGAICTSPSQETHRRLRRGVR

SEQ ID NO: 57 - protein, 38 aa, Gallus gallus
  tPA pro
MWKTLRMKGKLLSLLLLVGVIKTAQCQGTHMRYKRGAR

SEQ ID NO: 58 - protein, 36 aa, Desmodus rotundus
  tPA pro
MVNTMKTKLLCVLLLCGAVFSLPRQETYRQLARGSR

SEQ ID NO: 59 - protein, 36 aa, Oryctolagus cuniculus
  tPA pro
MWNPGVRELLCVLLLCGAACARPSQEAPARVRRGAR

SEQ ID NO: 60 - protein, 22 aa, Erwinia carotovora
  PelB
MKYLLPTAAAGLLLLAAQPAMA

SEQ ID NO: 61 - protein, 21 aa, Escherichia coli
  OmpA
MKKTAIAIAVALAGFATVAQA

SEQ ID NO: 62 - protein, 23 aa, Escherichia coli
  Stll
MKKNIAFLLASMFVFSIATNAYA

SEQ ID NO: 63 - protein, 28 aa, Bacillus sp.
  End
MFKFKKKFLVGLTAAFMSISMFSATASA

SEQ ID NO: 64 - protein, 21 aa, Escherichia coli
  PhoA
MKQSTIALALLPLLFTPVTKA

SEQ ID NO: 65 - protein, 22 aa, Escherichia coli
  OmpF
MMKRNILAVIVPALLVAGTANA

SEQ ID NO: 66 - protein, 21 aa, Escherichia coli
  PhoE
MKKSTLALVVMGIVASASVQA

SEQ ID NO: 67 - protein, 26 aa, Escherichia coli
  MalE
MKIKTGARILALSALTTMMFSASALA

SEQ ID NO: 68 - protein, 21 aa, Escherichia coli
  OmpC
MKVKVLSLLVPALLVAGAANA

SEQ ID NO: 69 - protein, 20 aa, Escherichia coli
  Lpp
MKATKLVLGAVILGSTLLAG

SEQ ID NO: 70 - protein, 19 aa, Serratia Marcesens
  Lipoprotein
MNRTKLVLGAVILGSHSAG

SEQ ID NO: 71 - protein, 25 aa, Escherichia coli
  LamB
MMITLRKLPLAVAVAAGVMSAQAMA

SEQ ID NO: 72 - protein, 20 aa, Escherichia coli
  OmpT
MRAKLLGIVLTTPIAISSFA

SEQ ID NO: 73 - protein, 21 aa, Escherichia coli
  LTB
MNKVKCYVLFTALLSSLYAHG

SEQ ID NO: 74 - protein, 25 aa, Escherichia coli
  RsbS
MNMKKLATLVSAVALSATVSANAMA

SEQ ID NO: 75 - protein, 18 aa, Escherichia coli
  LTA
MKNITFIFFILLASPLYA

SEQ ID NO: 76 - protein, 24 aa, Staphylococcus aureus
MKKLIFLIVIALVLSACNSNSSHA

SEQ ID NO: 77 - protein, 36 aa, Staphylococcus aureus
MKKKNIYSIRKLGVGIASVTLGTLLISGGVTPAANA

SEQ ID NO: 78 - protein, 23 aa, Escherichia coli
MSIQHFRVALIPFFAAFCLPVFA

SEQ ID NO: 79 - protein, 19 aa, Escherichia coli
MMKKTITLLTALLPLASAV

SEQ ID NO: 80 - protein, 18 aa, Bacteriophage M13
MKKLLFAIPLVVPFYSHS

SEQ ID NO: 81 - protein, 19 aa, Saccharomyces cerevisiae
MRFPSIFTAVLFAASSALA

SEQ ID NO: 82 - protein, 18 aa, Schizosaccharomyces pombe
MFLQNLFLGFLAVVCANA

SEQ ID NO: 83 - protein, 16 aa, Kluyveromyces lactis
MLVSDSSVDGGERRSS

SEQ ID NO: 84 - protein, 19 aa, Saccharomyces cerevisiae
MLLQAFLFLLAGFAAKISA

SEQ ID NO: 85 - protein, 30 aa, Nichotiana tabacum
MGFFLFSQMPSFFLVSTLLLFLIISHSSHA

SEQ ID NO: 86 - protein, 40 aa, Autographa californica
MLLVNQSHQGFNKEHTSKMVSAIVLYVLLAAAAHSAFAAG

SEQ ID NO: 87 - protein, 21 aa, Apis mellifera
MKFLVNVALVFMVVYISYIYA

SEQ ID NO: 88 - protein, 18 aa, Autographa californica
MTILCWLALLSTLTAVNA

SEQ ID NO: 89 - protein, 23 aa, Homo sapiens
MDAMKRGLCCVLLLCGAVFVSPS

SEQ ID NO: 90 - protein, 17 aa, Homo sapiens
MLLLLLLLGLRLQLSLG

SEQ ID NO: 91 - protein, 26 aa, Homo sapiens
MATGSRTSLLLAFGLLCLPWLQEGSA

SEQ ID NO: 92 - protein, 18 aa, Homo sapiens
MKWVTFISLLFLFSSAYS

SEQ ID NO: 93 - protein, 32 aa, Homo sapiens
MRAAPLLLARAASLSLGFLFLLFFWLDRSVLA

SEQ ID NO: 94 - protein, 6 aa, Artificial Sequence
  AU1
DTYRYI

SEQ ID NO: 95 - protein, 6 aa, Artificial Sequence
  AU5
TDFYLK

SEQ ID NO: 96 - protein, 5 aa, Artificial Sequence
  DDDDK
DDDDK

SEQ ID NO: 97 - protein, 10 aa, Artificial Sequence
  c-myc
EQKLISEEDL

SEQ ID NO: 98 - protein, 13 aa, Artificial Sequence
  E-tag
GAPVPYPDPLEPR

SEQ ID NO: 99 - protein, 9 aa, Artificial Sequence
  HA
YPYDVPDYA

SEQ ID NO: 100 - protein, 6 aa, Artificial Sequence
  Poly-His
HHHHHH

SEQ ID NO: 101 - protein, 12 aa, Artificial Sequence
  E2 tag
GVSSTSSDFRDR

SEQ ID NO: 102 - protein, 12 aa, Artificial Sequence
  HSV
SQPELAPEDPED

SEQ ID NO: 103 - protein, 11 aa, Artificial Sequence
  KT3
KPPTPPPEPET

SEQ ID NO: 104 - protein, 15 aa, Artificial Sequence
  S-tag
KETAAAKFERQHMDS

SEQ ID NO: 105 - protein, 11 aa, Artificial Sequence
  VSV-G
YTDIEMNRLGK

SEQ ID NO: 106 - protein, 11 aa, Artificial Sequence
  T7
MASMTGGQQMG

SEQ ID NO: 107 - protein, 14 aa, Artificial Sequence
  V5
GKPIPNPLLGLDST

SEQ ID NO: 108 - protein, 6 aa, Artificial Sequence
  Glu-Glu
EYMPME

SEQ ID NO: 109 - protein, 1024 aa, Escherichia coli
MTMITDSLAVVLQRRDWENPGVTQLNRLAAHPPFASWRNSEEARTDRPSQQLRSLNGEWRFAWFPAPEAVPESWLECDLPEADTVVVPSNWQMHGYDAPIYTNVTYPITVNPPFVPTENPTGCYSLTFNVDESWLQEGQTRIIFDGVNSAFHLWCNGRWVGYGQDSRLPSEFDLSAFLRAGENRLAVMVLRWSDGSYLEDQDMWRMSGIFRDVSLLHKPTTQISDFHVATRFNDDFSRAVLEAEVQMCGELRDYLRVTVSLWQGETQVASGTAPFGGEIIDERGGYADRVTLRLNVENPKLWSAEIPNLYRAVVELHTADGTLIEAEACDVGFREVRIENGLLLLNGKPLLIRGVNRHEHHPLHGQVMDEQTMVQDILLMKQNNFNAVRCSHYPNHPLWYTLCDRYGLYVVDEANIETHGMVPMNRLTDDPRWLPAMSERVTRMVQRDRNHPSVIIWSLGNESGHGANHDALYRWIKSVDPSRPVQYEGGGADTTATDIICPMYARVDEDQPFPAVPKWSIKKWLSLPGETRPLILCEYAHAMGNSLGGFAKYWQAFRQYPRLQGGFVWDWVDQSLIKYDENGNPWSAYGGDFGDTPNDRQFCMNGLVFADRTPHPALTEAKHQQQFFQFRLSGQTIEVTSEYLFRHSDNELLHWMVALDGKPLASGEVPLDVAPQGKQLIELPELPQPESAGQLWLTVRVVQPNATAWSEAGHISAWQQWRLAENLSVTLPAASHAIPHLTTSEMDFCIELGNKRWQFNRQSGFLSQMWIGDKKQLLTPLRDQFTRAPLDNDIGVSEATRIDPNAWVERWKAAGHYQAEAALLQCTADTLADAVLITTAHAWQHQGKTLFISRKTYRIDGSGQMAITVDVEVASDTPHPARIGLNCQLAQVAERVNWLGLGPQENYPDRLTAACFDRWDLPLSDMYTPYVFPSENGLRCGTRELNYGPHQWRGDFQFNISRYSQQQLMETSHRHLLHAEEGTWLNIDGFHMGIGGDDSWSPSVSAEFQLSAGRYHYQLVWCQK

SEQ ID NO: 110 - protein, 881 aa, Saccharomyces cerevisiae
MKLLSSIEQACDICRLKKLKCSKEKPKCAKCLKNNWECRYSPKTKRSPLTRAHLTEVESRLERLEQLFLLIFPREDLDMILKMDSLQDIKALLTGLFVQDNVNKDAVTDRLASVETDMPLTLRQHRISATSSSEESSNKGQRQLTVSIDSAAHHDNSTIPLDFMPRDALHGFDWSEEDDMSDGLPFLKTDPNNNGFFGDGSLLCILRSIGFKPENYTNSNVNRLPTMITDRYTLASRSTTSRLLQSYLNNFHPYCPIVHSPTLMMLYNNQIEIASKDQWQILFNCILAIGAWCIEGESTDIDVFYYQNAKSHLTSKVFESGSIILVTALHLLSRYTQWRQKTNTSYNFHSFSIRMAISLGLNRDLPSSFSDSSILEQRRRIWWSVYSWEIQLSLLYGRSIQLSQNTISFPSSVDDVQRTTTGPTIYHGIIETARLLQVFTKIYELDKTVTAEKSPICAKKCLMICNEIEEVSRQAPKFLQMDISTTALTNLLKEHPWLSFTRFELKWKQLSLIIYVLRDFFTNFTQKKSQLEQDQNDHQSYEVKRCSIMLSDAAQRTVMSVSSYMDNHNVTPYFAWNCSYYLFNAVLVPIKTLLSNSKSNAENNETAQLLQQINTVLMLLKKLATFKIQTCEKYIQVLEEVCAPFLLSQCAIPLPHISYNNSNGSAIKNIVGSATIAQYPTLPEENVNNISVKYVSPGSVGPSPVPLKSGASFSDLVKLLSNRPPSRNSPVTIPRSTPSHRSVTPFLGQQQQLQSLVPLTPSALFGGANFNQSGNIADSSLSFTFTNSSNGPNLITTQTNSQALSQPIASSNVHDNFMNNEITASKIDDGNNSKPLSPGWTDQTAYNAFGITTGMFNTTTMDDVYNYLFDDEDTPPNPKKE

SEQ ID NO: 111 - protein, 326 aa, Vibrio fischeri
MKFGLFFLNFQKDGITSEETLDNMVKTVTLIDSTKYHFNTAFVNEHHFSKNGIVGAPITAAGFLLGLTNKLHIGSLNQVITTHHPVRVAEEASLLDQMSEGRFILGFSDCESDFEMEFFRRHISSRQQQFEACYEIINDALTTGYCHPQNDFYDFPKVSINPHCYSENGPKQYVSATSKEVVMWAAKKALPLTFKWEDNLETKERYAILYNKTAQQYGIDISDVDHQLTVIANLNADRSTAQEEVREYLKDYITETYPQMDRDEKINCIIEENAVGSHDDYYESTKLAVEKTGSKNILLSFESMSDIKDVKDIIDMLNQKIEMNLP

SEQ ID NO: 112 - protein, 354 aa, Vibrio fischeri
MKFGNICFSYQPPGETHKLSNGSLCSAWYRLRRVGFDTYWTLEHHFTEFGLTGNLFVAAANLLGRTKTLNVGTMGVVIPTAHPVRQLEDVLLLDQMSKGRFNFGTVRGLYHKDFRVFGVDMEESRAITQNFYQMIMESLQTGTISSDSDYIQFPKVDVYPKVYSKNVPTCMTAESASTTEWLAIQGLPMVLSWIIGTNEKKAQMELYNEIATEYGHDISKIDHCMTYICSVDDDAQKAQDVCREFLKNWYDSYVNATNIFNDSNQTRGYDYHKGQWRDFVLQGHTNTNRRVDYSNGINPVGTPEQCIEIIQRDIDATGITNITCGFEANGTEDEIIASMRRFMTQVAPFLKEPK

SEQ ID NO: 113 - protein, 550 aa, Photinus pyralis
MEDAKNIKKGPAPFYPLEDGTAGEQLHKAMKRYALVPGTIAFTDAHIEVNITYAEYFEMSVRLAEAMKRYGLNTNHRIVVCSENSLQFFMPVLGALFIGVAVAPANDIYNERELLNSMNISQPTVVFVSKKGLQKILNVQKKLPIIQKIIIMDSKTDYQGFQSMYTFVTSHLPPGFNEYDFVPESFDRDKTIALIMNSSGSTGLPKGVALPHRTACVRFSHARDPIFGNQIIPDTAILSVVPFHHGFGMFTTLGYLICGFRVVLMYRFEEELFLRSLQDYKIQSALLVPTLFSFFAKSTLIDKYDLSNLHEIASGGAPLSKEVGEAVAKRFHLPGIRQGYGLTETTSAILITPEGDDKPGAVGKVVPFFEAKVVDLDTGKTLGVNQRGELCVRGPMIMSGYVNNPEATNALIDKDGWLHSGDIAYWDEDEHFFIVDRLKSLIKYKGYQVAPAELESILLQHPNIFDAGVAGLPDDDAGELPAAVVVLEHGKTMTEKEIVDYVASQVTTAKKLRGGVVFVDEVPKGLTGKLDARKIREILIKAKKGGKSKL

SEQ ID NO: 114 - protein, 396 aa, Escherichia coli
MKIKTGARILALSALTTMMFSASALAKIEEGKLVIWINGDKGYNGLAEVGKKFEKDTGIKVTVEHPDKLEEKFPQVAATGDGPDIIFWAHDRFGGYAQSGLLAEITPDKAFQDKLYPFTWDAVRYNGKLIAYPIAVEALSLIYNKDLLPNPPKTWEEIPALDKELKAKGKSALMFNLQEPYFTWPLIAADGGYAFKYENGKYDIKDVGVDNAGAKAGLTFLVDLIKNKHMNADTDYSIAEAAFNKGETAMTINGPWAWSNIDTSKVNYGVTVLPTFKGQPSKPFVGVLSAGINAASPNKELAKEFLENYLLTDEGLEAVNKDKPLGAVALKSYEEELAKDPRIAATMENAQKGEIMPNIPQMSAFWYAVRTAVINAASGRQTVDEALKDAQTRITK

SEQ ID NO: 115 - protein, 524 aa, Staphylococcus aureus
MKKKNIYSIRKLGVGIASVTLGTLLISGGVTPAANAAQHDEAQQNAFYQVLNMPNLNADQRNGFIQSLKDDPSQSANVLGEAQKLNDSQAPKADAQQNNFNKDQQSAFYEILNMPNLNEAQRNGFIQSLKDDPSQSTNVLGEAKKLNESQAPKADNNFNKEQQNAFYEILNMPNLNEEQRNGFIQSLKDDPSQSANLLSEAKKLNESQAPKADNKFNKEQQNAFYEILHLPNLNEEQRNGFIQSLKDDPSQSANLLAEAKKLNDAQAPKADNKFNKEQQNAFYEILHLPNLTEEQRNGFIQSLKDDPSVSKEILAEAKKLNDAQAPKEEDNNKPGKEDNNKPGKEDNNKPGKEDNNKPGKEDNNKPGKEDNNKPGKEDGNKPGKEDNKKPGKEDGNKPGKEDNKKPGKEDGNKPGKEDGNKPGKEDGNGVHVVKPGDTVNDIAKANGTTADKIAADNKLADKNMIKPGQELVVDKKQPANHADANKAQALPETGEENPFIGTTVFGGLSLALGAALLAGRRREL

SEQ ID NO: 116 - protein, 448 aa, Streptococcus sp.
MEKEKKVKYFLRKSAFGLASVSAAFLVGSTVFAVDSPIEDTPIIRNGGELTNLLGNSETTLALRNEESATADLTAAAVADTVAAAAAENAGAAAWEAAAAADALAKAKADALKEFNKYGVSDYYKNLINNAKTVEGIKDLQAQVVESAKKARISEATDGLSDFLKSQTPAEDTVKSIELAEAKVLANRELDKYGVSDYHKNLINNAKTVEGVKELIDEILAALPKTDTYKLILNGKTLKGETTTEAVDAATAEKVFKQYANDNGVDGEWTYDDATKTFTVTEKPEVIDASELTPAVTTYKLVINGKTLKGETTTKAVDAETAEKAFKQYANDNGVDGVWTYDDATKTFTVTEMVTEVPGDAPTEPEKPEASIPLVPLTPATPIAKDDAKKDDTKKEDAKKPEAKKDDAKKAETLPTTGEGSNPFFTAAALAVMAGAGALAVASKRKED

SEQ ID NO: 117 - protein, 238 aa, Aequorea victoria
MSKGEELFTGVVPILVELDGDVNGHKFSVSGEGEGDATYGKLTLKFICTTGKLPVPWPTLVTTFSYGVQCFSRYPDHMKQHDFFKSAMPEGYVQERTIFFKDDGNYKTRAEVKFEGDTLVNRIELKGIDFKEDGNILGHKLEYNYNSHNVYIMADKQKNGIKVNFKIRHNIEDGSVQLADHYQQNTPIGDGPVLLPDNHYLSTQSALSKDPNEKRDHMVLLEFVTAAGITHGMDELYK

SEQ ID NO: 118 - protein, 101 aa, Homo sapiens
MSDQEAKPSTEDLGDKKEGEYIKLKVIGQDSSEIHFKVKMTTHLKKLKESYCQRQGVPMNSLRFLFEGQRIADNHTPKELGMEEEDVIEVYQEQTGGHSTV

SEQ ID NO: 119 - protein, 495 aa, Homo sapiens [sequence omitted]

SEQ ID NO: 120 - protein, 495 aa, Escherichia coli [sequence omitted]

SEQ ID NO: 121 - protein, 9 aa, Artificial Sequence
  Streptag
AWRHPQFGG

SEQ ID NO: 122 - protein, 109 aa, Escherichia coli
MSDKIIHLTDDSFDTDVLKADGAILVDFWAEWCGPCKMIAPILDEIADEYQGKLTVAKLNIDQNPGTAPKYGIRGIPTLLLFKNGEVAATKVGALSKGQLKEFLDANLA

SEQ ID NO: 123 - protein, 218 aa, Schistosoma japonicum
MSPILGYWKIKGLVQPTRLLLEYLEEKYEEHLYERDEGDKWRNKKFELGLEFPNLPYYIDGDVKLTQSMAIIRYIADKHNMLGGCPKERAEISMLEGAVLDIRYGVSRIAYSKDFETLKVDFLSKLPEMLKMFEDRLCHKTYLNGDHVTHPDFMLYDALDVVLYMDPMCLDAFPKLVCFKKRIEAIPQIDKYLKSSKYIAWPLQGWQATFGGGDHPPK

SEQ ID NO: 124 - protein, 8 aa, Artificial Sequence
  FLAG
DYKDDDDK

SEQ ID NO: 125 - protein, 12 aa, Artificial Sequence
  Protein C
EDQVDPRLIDGK

SEQ ID NO: 126 - protein, 12 aa, Artificial Sequence
  Tag-100
EETARFQPGYRS

SEQ ID NO: 127 - protein, 8 aa, Artificial Sequence
  T7 gene 10
DLYDDDDK

SEQ ID NO: 128 - DNA, 6 bp, Artificial Sequence
  XhoI linker
ctcgag

SEQ ID NO: 129 - DNA, 6 bp, Artificial Sequence
  XbaI linker
tctaga

SEQ ID NO: 130 - DNA, 6 bp, Artificial Sequence
  NheI linker
gctagc

SEQ ID NO: 131 - DNA, 8 bp, Artificial Sequence
  NotI linker
gcggccgc

SEQ ID NO: 132 - DNA, 6 bp, Artificial Sequence
  EcoRI linker
gaattc

SEQ ID NO: 133 - protein, 6 aa, Artificial Sequence
  Thrombin cleavage site
  VARIANT 4: Xaa = R or K
LVPXGS

SEQ ID NO: 134 - protein, 5 aa, Artificial Sequence
  Enterokinase cleavage site
DDDDK

SEQ ID NO: 135 - protein, 6 aa, Artificial Sequence
  VARIANT 6: Xaa=Q or G
  TEV-protease
ENLYFX

SEQ ID NO: 136 - protein, 4 aa, Artificial Sequence
  VARIANT 2: Xaa=D or E
  Factor Xa cleavage site
IXGR

SEQ ID NO: 137 - protein, 3 aa, Artificial Sequence
  VARIANT 3: Xaa=D or E
  Genease I  cleavage site
HYX

SEQ ID NO: 138 - protein, 7 aa, Artificial Sequence
  VARIANT 6: Xaa=Q or G
  preScission  cleavage site
LEVLFXP

SEQ ID NO: 139 - DNA, 984 bp, Homo Sapiens
  CDS (37)...(897): SR005A11
tgcccccacccccttaggcccgagggatcaggagctatgggaccagaggccctgtcatctttactgctgctgctcttggtggcaagtggagatgctgacatgaagggacattttgatcctgccaagtgccgctatgccctgggcatgcaggaccggaccatcccagacagtgacatctctgcttccagctcctggtcagattccactgccgcccgccacagcaggttggagagcagtgacggggatggggcctggtgccccgcagggtcggtgtttcccaaggaggaggagtacttgcaggtggatctacaacgactgcacctggtggctctggtgggcacccagggacggcatgccgggggcctgggcaaggagttctcccggagctaccggctgcgttactcccgggatggtcgccgctggatgggctggaaggaccgctggggtcaggaggtgatctcaggcaatgaggaccctgagggagtggtgctgaaggaccttgggccccccatggttgcccgactggttcgcttctacccccgggctgaccgggtcatgagcgtctgtctgcgggtagagctctatggctgcctctggagggatggactcctgtcttacaccgcccctgtggggcagacaatgtatttatctgaggccgtgtacctcaacgactccacctatgacggacataccgtgggcggactgcagtatgggggtctgggccagctggcagatggtgtggtggggctggatgactttaggaagagtcaggagctgcgggtctggccaggctatgactatgtgggatggagcaaccacagcttctccagtggctatgtggagatggagtttgagtttgaccggctgagggccttccaggctatgcagatgtggtgaacaattcctctccggcactgggaggcaccttcccgccagccccctggtggccgcctggcccacctcccaccaacttcagcagcttgg

SEQ ID NO: 140 - protein, 286 aa, Homo Sapiens [sequence omitted]

SEQ ID NO: 141 - DNA, 788 bp, Homo Sapiens
  CDS (37)...(768): SR005A10
tgcccccacccccttaggcccgagggatcaggagctatgggaccagaggccctgtcatctttactgctgctgctcttggtggcaagtggagatgctgacatgaagggacattttgatcctgccaagtgccgctatgccctgggcatgcaggaccggaccatcccagacagtgacatctctgcttccagctcctggtcagattccactgccgcccgccacagcaggttggagagcagtgacggggatggggcctggtgccccgcagggtcggtgtttcccaaggaggaggagtacttgcaggtggatctacaacgactgcacctggtggctctggtgggcacccagggacggcatgccgggggcctgggcaaggagttctcccggagctaccggctgcgttactcccgggatggtcgccgctggatgggctggaaggaccgctggggtcaggaggtgatctcaggcaatgaggaccctgagggagtggtgctgaaggaccttgggccccccatggttgcccgactggttcgcttctacccccgggctgaccgggtcatgagcgtctgtctgcgggtagagctctatggctgcctctggagggactgcagtatgggggtctgggccagctggcagatggtgtggtggggctggatgactttaggaagagtcaggagctgcgggtctggccaggctatgactatgtgggatggagcaaccacagcttctccagtggctatgtggagatggagtttgagtttgaccggctgagggccttccaggctatgcag

SEQ ID NO: 142 - protein, 243 aa, Homo Sapiens
  SR005A10
MGPEALSSLLLLLLVASGDADMKGHFDPAKCRYALGMQDRTIPDSDISASSSWSDSTAARHSRLESSDGDGAWCPAGSVFPKEEEYLQVDLQRLHLVALVGTQGRHAGGLGKEFSRSYRLRYSRDGRRWMGWKDRWGQEVISGNEDPEGVVLKDLGPPMVARLVRFYPRADRVMSVCLRVELYGCLWRDCSMGVWASWQMVWWGWMTLGRVRSCGSGQAMTMWDGATTASPVAMWRWSLSLTG

SEQ ID NO: 143 - protein, 444 aa, Homo sapiens
  DDR1.h
MGPEALSSLLLLLLVASGDADMKGHFDPAKCRYALGMQDRTIPDSDISASSSWSDSTAARHSRLESSDGDGAWCPAGSVFPKEEEYLQVDLQRLHLVALVGTQGRHAGGLGKEFSRSYRLRYSRDGRRWMGWKDRWGQEVISGNEDPEGVVLKDLGPPMVARLVRFYPRADRVMSVCLRVELYGCLWRDGLLSYTAPVGQTMYLSEAVYLNDSTYDGHTVGGLQYGGLGQLADGVVGLDDFRKSQELRVWPGYDYVGWSNHSFSSGYVEMEFEFDRLRAFQAMQVHCNNMHTLGARLPGGVECRFRRGPAMAWEGEPMRHNLGGNLGDPRARAVSVPLGGRVARFLQCRFCPHLPRTASPIMPRLTLLPCRASPGATPMLCLHCPQGQSGMGPPEWISLDLDSASRRSLARASLGRCTCVRSTALKIWLVLISPLMCVRDTLCW

SEQ ID NO: 144 - DNA, 1683 bp, Homo Sapiens
  CDS (20)...(1444): SR004G03
caggtcccggcccggagctatggagcggcgctggcccctggggctagggctggtgctgctgctctgcgccccgctgcccccgggggcgcgcgccaaggaagttactctgatggacacaagcaaggcacagggagagctgggctggctgctggatcccccaaaagatgggtggagtgaacagcaacagatactgaatgggacacccctgtacatgtaccaggactgcccaatgcaaggacgcagagacactgaccactggcttcgctccaattggatctaccgcggggaggaggcttcccgcgtccacgtggagctgcagttcaccgtgcgggactgcaagagtttccctgggggagccgggcctctgggctgcaaggagaccttcaaccttctgtacatggagagtgaccaggatgtgggcattcagctccgacggcccttgttccagaaggtaaccacggtggctgcagaccagagcttcaccattcgagaccttgtgtctggctccgtgaagctgaatgtggagcgctgctctctgggccgcctgacccgccgtggcctctacctcgctttccacaacccgggtgcctgtgtggccctggtgtctgtccgggtcttctaccagcgctgtcctgagaccctgaatggcttggcccaattcccagacactctgcctggccccgctgggttggtggaagtggcggggacctgcttgccccacgcgcgggccagccccaggccctcaggtgcaccccgcatgcactgcagccctgatggcgagtggctggtgcctgtaggacggtgccactgtgagcctggctatgaggaaggtggcagtggcgaagcatgtgttgcctgccctagcggctcctaccggatggacatggacacaccccattgtctcacgtgcccccagcagagcactgctgagtctgagggggccaccatctgtacctgtgagagcggccattacagagctcccggggagggcccccaggtggcatgcacaggtcccccctcggccccccgaaacctgagcttctctgcctcagggactcagctctccctgcgttgggaacccccagcagatacggggggacgccaggatgtcagatacagtgtgaggtgttcccagtgtcagggcacagcacaggacggggggccctgccagccctgtggggtgggcgtgcacttctcgccgggggcccgggggctcaccacacctgcagtgcatgtcaatggccttgaaccttatgccaactacacctttaatgtggaagcccaaaatggagtgtcagggctgggcagctctggccatgccagcacctcagtcagcatcagcatggggcatgcaggtgagaggctgagaggggctgggacagggacctggtggagacagaagggcttaagaccacagaacaaactgatgggcaggaagccatagaaaagttactaaggttatttcctttttccttacatatccaaccttatccctctggacccccagagtcactgtcaggcctgtctctgagactggtgaagaaagaaccgaggcaactagagctgacctgggcggggtcccggccccgaagccctggggcgaacctgacctatgagctgcacgtgctgaaccaggatgaagaacggtaccagatggttctagaacccagggtcttgctgaca

SEQ ID NO: 145 - protein, 474 aa, Homo Sapiens
  SR004G03
MERRWPLGLGLVLLLCAPLPPGARAKEVTLMDTSKAQGELGWLLDPPKDGWSEQQQILNGTPLYMYQDCPMQGRRDTDHWLRSNWIYRGEEASRVHVELQFTVRDCKSFPGGAGPLGCKETFNLLYMESDQDVGIQLRRPLFQKVTTVAADQSFTIRDLVSGSVKLNVERCSLGRLTRRGLYLAFHNPGACVALVSVRVFYQRCPETLNGLAQFPDTLPGPAGLVEVAGTCLPHARASPRPSGAPRMHCSPDGEWLVPVGRCHCEPGYEEGGSGEACVACPSGSYRMDMDTPHCLTCPQQSTAESEGATICTCESGHYRAPGEGPQVACTGPPSAPRNLSFSASGTQLSLRWEPPADTGGRQDVRYSVRCSQCQGTAQDGGPCQPCGVGVHFSPGARGLTTPAVHVNGLEPYANYTFNVEAQNGVSGLGSSGHASTSVSISMGHAGERLRGAGTGTWWRQKGLRPQNKLMGRKP

SEQ ID NO: 146 - DNA, 1375 bp, Homo Sapiens
  CDS (20)...(955): SR004G07
caggtcccggcccggagctatggagcggcgctggcccctggggctagggctggtgctgctgctctgcgccccgctgcccccgggggcgcgcgccaaggaagttactctgatggacacaagcaaggcacagggagagctgggctggctgctggatcccccaaaagatgggtggagtgaacagcaacagatactgaatgggacacccctgtacatgtaccaggactgcccaatgcaaggacgcagagacactgaccactggcttcgctccaattggatctaccgcggggaggaggcttcccgcgtccacgtggagctgcagttcaccgtgcgggactgcaagagtttccctgggggagccgggcctctgggctgcaaggagaccttcaaccttctgtacatggagagtgaccaggatgtgggcattcagctccgacggcccttgttccagaaggtaaccacggtggctgcagaccagagcttcaccattcgagaccttgtgtctggctccgtgaagctgaatgtggagcgctgctctctgggccgcctgacccgccgtggcctctacctcgctttccacaacccgggtgcctgtgtggccctggtgtctgtccgggtcttctaccagcgctgtcctgagaccctgaatggcttggcccaattcccagacactctgcctggccccgctgggttggtggaagtggcggggacctgcttgccccacgcgcgggccagccccaggccctcaggtgcaccccgcatgcactgcagccctgatggcgagtggctggtgcctgtaggacggtgccactgtgagcctggctatgaggaaggtggcagtggcgaagcatgtgttggtaagaacggaggcggtgagaacctgaggaaccactcgggaggattgcaggagtaccccggcagagaaggaggccagtgctccgcctcagtgggtttttaacctgagtgtcccagagcagcggacacacacatgcagagatgtttccagtagaagggattggggcaggaaggggtggtggtggttctgcctgtaaaaacatttacagaaccactgctctgctgcgttctctctccagcctgccctagcggctcctaccggatggacatggacacaccccattgtctcacgtgcccccagcagagcactgctgagtctgagggggccaccatctgtacctgtgagagcggccattacagagctcccggggagggcccccaggtggcatgcacagagtcactgtcaggcctgtctctgagactggtgaagaaagaaccgaggcaactagagctgacctgggcggggtcccggccccgaagccctggggcgaacctgacctatgagctgcacgtgctgaaccag

SEQ ID NO: 147 - protein, 311 aa, Homo Sapiens
  SR004G07
MERRWPLGLGLVLLLCAPLPPGARAKEVTLMDTSKAQGELGWLLDPPKDGWSEQQQILNGTPLYMYQDCPMQGRRDTDHWLRSNWIYRGEEASRVHVELQFTVRDCKSFPGGAGPLGCKETFNLLYMESDQDVGIQLRRPLFQKVTTVAADQSFTIRDLVSGSVKLNVERCSLGRLTRRGLYLAFHNPGACVALVSVRVFYQRCPETLNGLAQFPDTLPGPAGLVEVAGTCLPHARASPRPSGAPRMHCSPDGEWLVPVGRCHCEPGYEEGGSGEACVGKNGGGENLRNHSGGLQEYPGREGGQCSASVGF

SEQ ID NO: 148 - DNA, 1511 bp, Homo Sapiens
  CDS (20)...(1492): SR004H03
caggtcccggcccggagctatggagcggcgctggcccctggggctagggctggtgctgctgctctgcgccccgctgcccccgggggcgcgcgccaaggaagttactctgatggacacaagcaaggcacagggagagctgggctggctgctggatcccccaaaagatgggtggagtgaacagcaacagatactgaatgggacacccctgtacatgtaccaggactgcccaatgcaaggacgcagagacactgaccactggcttcgctccaattggatctaccgcggggaggaggcttcccgcgtccacgtggagctgcagttcaccgtgcgggactgcaagagtttccctgggggagccgggcctctgggctgcaaggagaccttcaaccttctgtacatggagagtgaccaggatgtgggcattcagctccgacggcccttgttccagaaggtaaccacggtggctgcagaccagagcttcaccattcgagaccttgtgtctggctccgtgaagctgaatgtggagcgctgctctctgggccgcctgacccgccgtggcctctacctcgctttccacaacccgggtgcctgtgtggccctggtgtctgtccgggtcttctaccagcgctgtcctgagaccctgaatggcttggcccaattcccagacactctgcctggccccgctgggttggtggaagtggcggggacctgcttgccccacgcgcgggccagccccaggccctcaggtgcaccccgcatgcactgcagccctgatggcgagtggctggtgcctgtaggacggtgccactgtgagcctggctatgaggaaggtggcagtggcgaagcatgtgttgcctgccctagcggctcctaccggatggacatggacacaccccattgtctcacgtgcccccagcagagcactgctgagtctgagggggccaccatctgtacctgtgagagcggccattacagagctcccggggagggcccccaggtggcatgcacaggtcccccctcggccccccgaaacctgagcttctctgcctcagggactcagctctccctgcgttgggaacccccagcagatacggggggacgccaggatgtcagatacagtgtgaggtgttcccagtgtcagggcacagcacaggacggggggccctgccagccctgtggggtgggcgtgcacttctcgccgggggcccgggggctcaccacacctgcagtgcatgtcaatggccttgaaccttatgccaactacacctttaatgtggaagcccaaaatggagtgtcagggctgggcagctctggccatgccagcacctcagtcagcatcagcatggggcatgcagatccaaccttatccctctggacccccagagtcactgtcaggcctgtctctgagactggtgaagaaagaaccgaggcaactagagctgacctgggcggggtcccggccccgaagccctggggcgaacctgacctatgagctgcacgtgctgaaccag

SEQ ID NO: 149 - protein, 490 aa, Homo Sapiens
  SR004H03
MERRWPLGLGLVLLLCAPLPPGARAKEVTLMDTSKAQGELGWLLDPPKDGWSEQQQILNGTPLYMYQDCPMQGRRDTDHWLRSNWIYRGEEASRVHVELQFTVRDCKSFPGGAGPLGCKETFNLLYMESDQDVGIQLRRPLFQKVTTVAADQSFTIRDLVSGSVKLNVERCSLGRLTRRGLYLAFHNPGACVALVSVRVFYQRCPETLNGLAQFPDTLPGPAGLVEVAGTCLPHARASPRPSGAPRMHCSPDGEWLVPVGRCHCEPGYEEGGSGEACVACPSGSYRMDMDTPHCLTCPQQSTAESEGATICTCESGHYRAPGEGPQVACTGPPSAPRNLSFSASGTQLSLRWEPPADTGGRQDVRYSVRCSQCQGTAQDGGPCQPCGVGVHFSPGARGLTTPAVHVNGLEPYANYTFNVEAQNGVSGLGSSGHASTSVSISMGHADPTLSLWTPRVTVRPVSETGEERTEATRADLGGVPAPKPWGEPDL

SEQ ID NO: 150 - protein, 166 aa, Homo sapiens
  EPHA1.b
MDTSKAQGELGWLLDPPKDGWSEQQQILNGTPLYMYQDCPMQGRRDTDHWLRSNWIYRGEEASRVHVELQFTVRDCKSFPGGAGPLGCKETFNLLYMESDQDVGIQLRRPLFQKVLLPSMPSGSWCRSLVAPYWVPEKVAETGRGCRGRILKRIWRLKAGHGGLCL

SEQ ID NO: 151 - DNA, 1721 bp, Homo Sapiens
  SR016E12
ctctctggctactagagacccactgcttactggcttatcgaaattaatacgactcactatagggagacccaagctggctagttaagcttggtaccgagctcggatccaccatggagctccaggcagcccgcgcctgcttcgccctgctgtggggctgtgcgctggccgcggccgcggcggcgcagggcaaggaagtggtactgctggactttgctgcagctggaggggagctcggctggctcacacacccgtatggcaaagggtgggacctgatgcagaacatcatgaatgacatgccgatctacatgtactccgtgtgcaacgtgatgtctggcgaccaggacaactggctccgcaccaactgggtgtaccgaggagaggctgagcgtatcttcattgagctcaagtttactgtacgtgactgcaacagcttccctggtggcgccagctcctgcaaggagactttcaacctctactatgccgagtcggacctggactacggcaccaacttccagaagcgcctgttcaccaagattgacaccattgcgcccgatgagatcaccgtcagcagcgacttcgaggcacgccacgtgaagctgaacgtggaggagcgctccgtggggccgctcacccgcaaaggcttctacctggccttccaggatatcggtgcctgtgtggcactactctccgtccgtgtctactacgagaagtgccccgagccgctgcagggcctggcccacttccctgagaccatcgccggctctgatgcaccttccctggccactgtggccggcacctgtgtggaccatgccgtggtgccaccggggggtgaagagccccgtatgcactgtgcagtggatggcgagtggctggtgcccattgggcagtgcctgtgccaggcaggctacgagaaggtggaggatgcctgccaggcctgctcgcctggattttttaagtttgaggcatccgagagcccctgcttggagtgccctgagcgcacgctgccatcccctgagggtgccacctcctgcgagtgtgaggaaggcttcttccgggcacctcaggacccagcgtcgatgccttgcacacgacccccttccgccccacactacctcacagccgtgggcatgggtgccaaggtggagctgcgctggacgccccctcaggacagcgggggccgcgaggacattgtctacagcgtcacctgcgaacagtgctggcccgagtctggggaatgcgggccgtgtgaggccagtgtgcgctactcggagcctcctcacggactgacccgcaccagtgtgacagtgagcgacctggagccccacatgaactacaccttcaccgtggaggcccgcaatggcgtctcaggcctggtaaccagccgcagcttccgtactgccagtgtcagcatcaaccagacagagccccccaaggtgaggctggagggccgcagcaccacctcgcttagcgtctcctggagcatccccccgccgcagcagagccgagtgtggaagtacgaggtcacttaccgcaagaaggtaactcccagaggggcggggctggctctagctgggccgacagcaggggacaggctggtcacactcgagtctagagggcccttcgaacaaaaactcatctcagaagaggatctgaatatgcataccggtcatcatcaccatcaccattgagtttaaacccgctgatcagcctcgactgtgcct

SEQ ID NO: 152 - protein, 497 aa, Homo Sapiens
  SR016E12
MELQAARACFALLWGCALAAAAAAQGKEVVLLDFAAAGGELGWLTHPYGKGWDLMQNIMNDMPIYMYSVCNVMSGDQDNWLRTNWVYRGEAERIFIELKFTVRDCNSFPGGASSCKETFNLYYAESDLDYGTNFQKRLFTKIDTIAPDEITVSSDFEARHVKLNVEERSVGPLTRKGFYLAFQDIGACVALLSVRVYYEKCPEPLQGLAHFPETIAGSDAPSLATVAGTCVDHAVVPPGGEEPRMHCAVDGEWLVPIGQCLCQAGYEKVEDACQACSPGFFKFEASESPCLECPERTLPSPEGATSCECEEGFFRAPQDPASMPCTRPPSAPHYLTAVGMGAKVELRWTPPQDSGGREDIVYSVTCEQCWPESGECGPCEASVRYSEPPHGLTRTSVTVSDLEPHMNYTFTVEARNGVSGLVTSRSFRTASVSINQTEPPKVRLEGRSTTSLSVSWSIPPPQQSRVWKYEVTYRKKVTPRGAGLALAGPTAGDRLVT

SEQ ID NO: 153 - protein, 495 aa, Homo Sapiens
  EPHA8.b
MAPARGRLPPALWVVTAAAAAATCVSAARGEVNLLDTSTIHGDWGWLTYPAHGWDSINEVDESFQPIHTYQVCNVMSPNQNNWLRTSWVPRDGARRVYAEIKFTLRDCNSMPGVLGTCKETFNLYYLESDRDLGASTQESQFLKIDTIAADESFTGADLGVRRLKLNTEVRSVGPLSKRGFYLAFQDIGACLAILSLRIYYKKCPAMVRNLAAFSEAVTGADSSSLVEVRGQCVRHSEERDTPKMYCSAEGEWLVPIGKCVCSAGYEERRDACVACELGFYKSAPGDQLCARCPPHSHSAAPAAQACHCDLSYYRAALDPPSSACTRPPSAPVNLISSVNGTSVTLEWAPPLDPGGRSDITYNAVCRRCPWALSRCEACGSGTRFVPQQTSLVQASLLVANLLAHMNYSFWIEAVNGVSDLSPEPRRAAVVNITTNQAGRRRNSVPQRPGPPASPASDPSRDQSSAGDVLWAFRQVPLWPCAPHQDPELEALHCL

SEQ ID NO: 154 - DNA, 1107 bp, Homo Sapiens
  CDS (20)...(748): SR005D06
tgcgggccgtcggccggcgatggccctggattatctactactgctcctcctggcatccgcagtggctgcgatggaagaaacgttaatggacaccagaacggctactgcagagctgggctggacggccaatcctgcgtccgggtgggaagaagtcagtggctacgatgaaaacctgaacaccatccgcacctaccaggtgtgcaatgtcttcgagcccaaccagaacaattggctgctcaccaccttcatcaaccggcggggggcccatcgcatctacacagagatgcgcttcactgtgagagactgcagcagcctccctaatgtcccaggatcctgcaaggagaccttcaacttgtattactatgagactgactctgtcattgccaccaagaagtcagccttctggtctgaggccccctacctcaaagtagacaccattgctgcagatgagagcttctcccaggtggactttgggggaaggctgatgaagcttgccctgcagggacattcaaggccagccaggaagctgaaggctgctcccactgcccctccaacagccgctcccctgcagaggcgtctcccatctgcacctgtcggaccggttattaccgagcggactttgaccctccagaagtggcatgcactagcgtcccatcaggtccccgcaatgttatctccatcgtcaatgagacgtccatcattctggagtggcaccctccaagggagacaggtgggcgggatgatgtgacctacaacatcatctgcaaaaagtgccgggcagaccgccggagctgctcccgctgtgacgacaatgtggagtttgtgcccaggcagctgggcctgacggagtgccgcgtctccatcagcagcctgtgggcccacaccccctacacctttgacatccaggccatcaatggagtctccagcaagagtcccttccccccacagcacgtctctgtcaacatcaccacaaaccaagccgccccctccaccgttcccatcatgcaccaagtcagtgccactatgaggagcatcaccttgtcatggccacagccggagcagcccaatggcatcatcctggactatgagatccggtactatgagaag

SEQ ID NO: 155 - protein, 242 aa, Homo Sapiens
  SR005D06
MALDYLLLLLLASAVAAMEETLMDTRTATAELGWTANPASGWEEVSGYDENLNTIRTYQVCNVFEPNQNNWLLTTFINRRGAHRIYTEMRFTVRDCSSLPNVPGSCKETFNLYYYETDSVIATKKSAFWSEAPYLKVDTIAADESFSQVDFGGRLMKLALQGHSRPARKLKAAPTAPPTAAPLQRRLPSAPVGPVITERTLTLQKWHALASHQVPAMLSPSSMRRPSFWSGTLQGRQVGGMM

SEQ ID NO: 156 - DNA, 1353 bp, Homo Sapiens
  SR012C08
agtcccgcgcggagtatcggcgtccacccgcccagggagagtcagacctgggggggcgagggccccccaaactcagttcggatcctacccgagtgaggcggcgccatggagctccgggtgctgctctgctgggcttcgttggccgcagctttggaagagaccctgctgaacacaaaattggaaactgctgatctgaagtgggtgacattccctcaggtggacgggcagtgggaggaactgagcggcctggatgaggaacagcacagcgtgcgcacctacgaagtgtgtgacgtgcagcgtgccccgggccaggcccactggcttcgcacaggttgggtcccacggcggggcgccgtccacgtgtacgccacgctgcgcttcaccatgctcgagtgcctgtccctgcctcgggctgggcgctcctgcaaggagaccttcaccgtcttctactatgagagcgatgcggacacggccacggccctcacgccagcctggatggagaacccctacatcaaggtggacacggtggccgcggagcatctcacccggaagcgccctggggccgaggccaccgggaaggtgaatgtcaagacgctgcgtctgggaccgctcagcaaggctggcttctacctggccttccaggaccagggtgcctgcatggccctgctatccctgcacctcttctacaaaaagtgcgcccagctgactgtgaacctgactcgattcccggagactgtgcctcgggagctggttgtgcccgtggccggtagctgcgtggtggatgccgtccccgcccctggccccagccccagcctctactgccgtgaggatggccagtgggccgaacagccggtcacgggctgcagctgtgctccggggttcgaggcagctgaggggaacaccaagtgccgagggcgccgagggtcccagcagcgtgcggttcctgaagacgtcagaaaaccgggcagagctgcgggggctgaagcggggagccagctacctggtgcaggtacgggcgcgctctgaggccggctacgggcccttcggccaggaacatcacagccagacccaactggatgagagcgagggctggcgggagcagctggccctgattgcgggcacggcagtcgtgggtgtggtcctggtcctggtggtcattgtggtcgcagttctctgcctcaggaagcagagcaatgggagagaagcagaatattcggacaaacacggacagtatctcatcggacatggtactaaggtctacatcgaccccttcacttatgaagaccctaatgaggctgtgagggaatttgcaaaagagatcgatgtctcctacgtcaagattgaagaggtgat

SEQ ID NO: 157 - protein, 306 aa, Homo Sapiens
  SR012C08
MELRVLLCWASLAAALEETLLNTKLETADLKWVTFPQVDGQWEELSGLDEEQHSVRTYEVCDVQRAPGQAHWLRTGWVPRRGAVHVYATLRFTMLECLSLPRAGRSCKETFTVFYYESDADTATALTPAWMENPYIKVDTVAAEHLTRKRPGAEATGKVNVKTLRLGPLSKAGFYLAFQDQGACMALLSLHLFYKKCAQLTVNLTRFPETVPRELVVPVAGSCVVDAVPAPGPSPSLYCREDGQWAEQPVTGCSCAPGFEAAEGNTKCRGRRGSQQRAVPEDVRKPGRAAGAEAGSQLPGAGTGAL

SEQ ID NO: 158 - DNA, 1813 bp, Homo Sapiens
  SR012D11
actcagttcggatcctacccgagtgaggcggcgccatggagctccgggtgctgctctgctgggcttcgttggccgcagctttggaagagaccctgctgaacacaaaattggaaactgctgatctgaagtgggtgacattccctcaggtggacgggcagtgggaggaactgagcggcctggatgaggaacagcacagcgtgcgcacctacgaagtgtgtgacgtgcagcgtgccccgggccaggcccactggcttcgcacaggttgggtcccacggcggggcgccgtccacgtgtacgccacgctgcgcttcaccatgctcgagtgcctgtccctgcctcgggctgggcgctcctgcaaggagaccttcaccgtcttctactatgagagcgatgcggacacggccacggccctcacgccagcctggatggagaacccctacatcaaggtggacacggtggccgcggagcatctcacccggaagcgccctggggccgaggccaccgggaaggtgaatgtcaagacgctgcgtctgggaccgctcagcaaggctggcttctacctggccttccaggaccagggtgcctgcatggccctgctatccctgcacctcttctacaaaaagtgcgcccagctgactgtgaacctgactcgattcccggagactgtgcctcgggagctggttgtgcccgtggccggtagctgcgtggtggatgccgtccccgcccctggccccagccccagcctctactgccgtgaggatggccagtgggccgaacagccggtcacgggctgcagctgtgctccggggttcgaggcagctgaggggaacaccaagtgccgagcctgtgcccagggcaccttcaagcccctgtcaggagaagggtcctgccagccatgcccagccaatagccactctaacaccattggatcagccgtctgccagtgccgcgtcgggtacttccgggcacgcacagacccccggggtgcaccctgcaccacccctccttcggctccgcggagcgtggtttcccgcctgaacggctcctccctgcacctggaatggagtgcccccctggagtctggtggccgagaggacctcacctacgccctccgctgccgggagtgccgacccggaggctcctgtgcgccctgcgggggagacctgacttttgaccccggcccccgggacctggtggagccctgggtggtggttcgagggctacgtcctgacttcacctatacctttgaggtcactgcattgaacggggtatcctccttagccacggggcccgtcccatttgagcctgtcaatgtcaccactgaccgagaggtacctcctgcagtgtctgacatccgggtgacgcggtcctcacccagcagcttgagcctggcctgggctgttccccgggcacccagtggggctgtgctggactacgaggtcaaataccatgagaagggcgccgagggtcccagcagcgtgcggttcctgaagacgtcagaaaaccgggcagagctgcgggggctgaagcggggagccagctacctggtgcagagagcgagggctggcgggagcagctggccctgattgcgggcacggcagtcgtgggtgtggtcctggtcctggtggtcattgtggtcgcagttctctgcctcaggaagcagagcaatgggagagaagcagaatattcggacaaacacggacagtatctcatcggacatggtactaaggtctacatcgaccccttcacttatgaagaccctaatgaggctgtgagggaatttgcaaaagagatcgatgtctcctacgtcaag

SEQ ID NO: 159 - protein, 516 aa, Homo Sapiens
  SR012D11
MELRVLLCWASLAAALEETLLNTKLETADLKWVTFPQVDGQWEELSGLDEEQHSVRTYEVCDVQRAPGQAHWLRTGWVPRRGAVHVYATLRFTMLECLSLPRAGRSCKETFTVFYYESDADTATALTPAWMENPYIKVDTVAAEHLTRKRPGAEATGKVNVKTLRLGPLSKAGFYLAFQDQGACMALLSLHLFYKKCAQLTVNLTRFPETVPRELVVPVAGSCVVDAVPAPGPSPSLYCREDGQWAEQPVTGCSCAPGFEAAEGNTKCRACAQGTFKPLSGEGSCQPCPANSHSNTIGSAVCQCRVGYFRARTDPRGAPCTTPPSAPRSVVSRLNGSSLHLEWSAPLESGGREDLTYALRCRECRPGGSCAPCGGDLTFDPGPRDLVEPWVVVRGLRPDFTYTFEVTALNGVSSLATGPVPFEPVNVTTDREVPPAVSDIRVTRSSPSSLSLAWAVPRAPSGAVLDYEVKYHEKGAEGPSSVRFLKTSENRAELRGLKRGASYLVQRARAGGSSWP

SEQ ID NO: 160 - DNA, 1801 bp, Homo Sapiens
  SR012E11
actcagttcggatcctacccgagtgaggcggcgccatggagctccgggtgctgctctgctgggcttcgttggccgcagctttggaagagaccctgctgaacacaaaattggaaactgctgatctgaagtgggtgacattccctcaggtggacgggcagtgggaggaactgagcggcctggatgaggaacagcacagcgtgcgcacctacgaagtgtgtgacgtgcagcgtgccccgggccaggcccactggcttcgcacaggttgggtcccacggcggggcgccgtccacgtgtacgccacgctgcgcttcaccatgctcgagtgcctgtccctgcctcgggctgggcgctcctgcaaggagaccttcaccgtcttctactatgagagcgatgcggacacggccacggccctcacgccagcctggatggagaacccctacatcaaggtggacacggtggccgcggagcatctcacccggaagcgccctggggccgaggccaccgggaaggtgaatgtcaagacgctgcgtctgggaccgctcagcaaggctggcttctacctggccttccaggaccagggtgcctgcatggccctgctatccctgcacctcttctacaaaaagtgcgcccagctgactgtgaacctgactcgattcccggagactgtgcctcgggagctggttgtgcccgtggccggtagctgcgtggtggatgccgtccccgcccctggccccagccccagcctctactgccgtgaggatggccagtgggccgaacagccggtcacgggctgcagctgtgctccggggttcgaggcagctgaggggaacaccaagtgccgagcctgtgcccagggcaccttcaagcccctgtcaggagaagggtcctgccagccatgcccagccaatagccactctaacaccattggatcagccgtctgccagtgccgcgtcgggtacttccgggcacgcacagacccccggggtgcaccctgcaccacccctccttcggctccgcggagcgtggtttcccgcctgaacggctcctccctgcacctggaatggagtgcccccctggagtctggtggccgagaggacctcacctacgccctccgctgccgggagtgccgacccggaggctcctgtgcgccctgcgggggagacctgacttttgaccccggcccccgggacctggtggagccctgggtggtggttcgagggctacgtcctgacttcacctatacctttgagtacctcctgcagtgtctgacatccgggtgacgcggtcctcacccagcagcttgagcctggcctgggctgttccccgggcacccagtggggctgtgctggactacgaggtcaaataccatgagaagggcgccgagggtcccagcagcgtgcggttcctgaagacgtcagaaaaccgggcagagctgcgggggctgaagcggggagccagctacctggtgcaggtacgggcgcgctctgaggccggctacgggcccttcggccaggaacatcacagccagacccaactggatgagagcgagggctggcgggagcagctggccctgattgcgggcacggcagtcgtgggtgtggtcctggtcctggtggtcattgtggtcgcagttctctgcctcaggaagcagagcaatgggagagaagcagaatattcggacaaacacggacagtatctcatcggacatggtactaaggtctacatcgaccccttcacttatgaagaccctaatgaggctgtgagggaatttgcaaaagagatcgatgtctcctacgtcaag

SEQ ID NO: 161 - protein, 414 aa, Homo Sapiens
  SR012E11
MELRVLLCWASLAAALEETLLNTKLETADLKWVTFPQVDGQWEELSGLDEEQHSVRTYEVCDVQRAPGQAHWLRTGWVPRRGAVHVYATLRFTMLECLSLPRAGRSCKETFTVFYYESDADTATALTPAWMENPYIKVDTVAAEHLTRKRPGAEATGKVNVKTLRLGPLSKAGFYLAFQDQGACMALLSLHLFYKKCAQLTVNLTRFPETVPRELVVPVAGSCVVDAVPAPGPSPSLYCREDGQWAEQPVTGCSCAPGFEAAEGNTKCRACAQGTFKPLSGEGSCQPCPANSHSNTIGSAVCQCRVGYFRARTDPRGAPCTTPPSAPRSVVSRLNGSSLHLEWSAPLESGGREDLTYALRCRECRPGGSCAPCGGDLTFDPGPRDLVEPWVVVRGLRPDFTYTFEYLLQCLTSG

SEQ ID NO: 162 - protein, 405 aa, Artificial Sequence
  EGFR.a
MRPSGTAGAALLALLAALCPASRALEEKKVCQGTSNKLTQLGTFEDHFLSLQRMFNNCEVVLGNLEITYVQRNYDLSFLKTIQEVAGYVLIALNTVERIPLENLQIIRGNMYYENSYALAVLSNYDANKTGLKELPMRNLQEILHGAVRFSNNPALCNVESIQWRDIVSSDFLSNMSMDFQNHLGSCQKCDPSCPNGSCWGAGEENCQKLTKIICAQQCSGRCRGKSPSDCCHNQCAAGCTGPRESDCLVCRKFRDEATCKDTCPPLMLYNPTTYQMDVNPEGKYSFGATCVKKCPRNYVVTDHGSCVRACGADSYEMEEDGVRKCKKCEGPCRKVCNGIGIGEFKDSLSINATNIKHFKNCTSISGDLHILPVAFRGDSFTHTPPLDPQELDILKTVKEITGLS

SEQ ID NO: 163 - protein, 680 aa, Homo sapiens
  ERBB2.1.d
MELAALCRWGLLLALLPLPPGAASTQVCTGTDMKLRLPASPETHLDMLRHLYQGCQVVQGNLELTYLPTNASLSFLQDIQEVQGYVLIAHNQVRQVPLQRLRIVRGTQLFEDNYALAVLDNGDPLNNTTPVTGASPGGLRELQLRSLTEILKGGVLIQRNPQLCYQDTILWKDIFHKNNQLALTLIDTNRSRACHPCSPMCKGSRCWGESSEDCQSLTRTVCAGGCARCKGPLPTDCCHEQCAAGCTGPKHSDCLACLHFNHSGICELHCPALVTYNTDTFESMPNPEGRYTFGASCVTACPYNYLSTDVGSCTLVCPLHNQEVTAEDGTQRCEKCSKPCARVCYGLGMEHLREVRAVTSANIQEFAGCKKIFGSLAFLPESFDGDPASNTAPLQPEQLQVFETLEEITGYLYISAWPDSLPDLSVFQNLQVIRGRILHNGAYSLTLQGLGISWLGLRSLRELGSGLALIHHNTHLCFVHTVPWDQLFRNPHQALLHTANRPEDECVGEGLACHQLCARGHCWGPGPTQCVNCSQFLRGQECVEECRVLQGLPREYVNARHCLPCHPECQPQNGSVTCFGPEADQCVACAHYKDPPFCVARCPSGVKPDLSYMPIWKFPDEEGACQPCPINCTHSCVDLDDKGCPAEQRARLAWTPGCTLHCPSLPHWMLGGHCCREGTP

SEQ ID NO: 164 - protein, 633 aa, Homo sapiens
  ERBB2.1.e
MELAALCRWGLLLALLPPGAASTQVCTGTDMKLRLPASPETHLDMLRHLYQGCQVVQGNLELTYLPTNASLSFLQDIQEVQGYVLIAHNQVRQVPLQRLRIVRGTQLFEDNYALAVLDNGDPLNNTTPVTGASPGGLRELQLRSLTEILKGGVLIQRNPQLCYQDTILWKDIFHKNNQLALTLIDTNRSRACHPCSPMCKGSRCWGESSEDCQSLTRTVCAGGCARCKGPLPTDCCHEQCAAGCTGPKHSDCLACLHFNHSGICELHCPALVTYNTDTFESMPNPEGRYTFGASCVTACPYNYLSTDVGSCTLVCPLHNQEVTAEDGTQRCEKCSKPCARVCYGLGMEHLREVRAVTSANIQEFAGCKKIFGSLAFLPESFDGDPASNTAPLQPEQLQVFETLEEITGYLYISAWPDSLPDLSVFQNLQVIRGRILHNGAYSLTLQGLGISWLGLRSLRELGSGLALIHHNTHLCFVHTVPWDQLFRNPHQALLHTANRPEDECVGEGLACHQLCARGHCWGPGPTQCVNCSQFLRGQECVEECRVLQGLPREYVNARHCLPCHPECQPQNGSVTCFGPEADQCVACAHYKDPPFCVARCPSGVKPDLSYMPIWKFPDEEGACQPCPINCTHS

SEQ ID NO: 165 - protein, 575 aa, Homo sapiens
  ERBB2.1.f
MELAALCRWGLLLALLPPGAASTQVCTGTDMKLRLPASPETHLDMLRHLYQGCQVVQGNLELTYLPTNASLSFLQDIQEVQGYVLIAHNQVRQVPLQRLRIVRGTQLFEDNYALAVLDNGDPLNNTTPVTGASPGGLRELQLRSLTEILKGGVLIQRNPQLCYQDTILWKDIFHKNNQLALTLIDTNRSRACHPCSPMCKGSRCWGESSEDCQSLTRTVCAGGCARCKGPLPTDCCHEQCAAGCTGPKHSDCLACLHFNHSGICELHCPALVTYNTDTFESMPNPEGRYTFGASCVTACPYNYLSTDVGSCTLVCPLHNQEVTAEDGTQRCEKCSKPCARVCYGLGMEHLREVRAVTSANIQEFAGCKKIFGSLAFLPESFDGDPASNTAPLQPEQLQVFETLEEITGYLYISAWPDSLPDLSVFQNLQVIRGRILHNGAYSLTLQGLGISWLGLRSLRELGSGLALIHHYTHLCFVHTVPWDQLFRNPHQALLHTANRPEDECGKTGSPVCALPICQHTAVPRGPWQQRSWTCADCPSLCTLLDSAQLWLAWPLGMASLAGSYLPWHPSLPLCF

SEQ ID NO: 166 - protein, 90 aa, Homo sapiens
  ERBB2.a
MELAALCRWGLLLALLPPGAASTQVCTGTDMKLRLPASPETHLDMLRHLYQGCQVVQGNLELTYLPTNASLSFLQVRPVGNPARPCLQLG

SEQ ID NO: 167 - protein, 419 aa, Artificial Sequence
  ERBB2.c BUILD 31
MELAALCRWGLLLALLPPGAASTQVCTGTDMKLRLPASPETHLDMLRHLYQGCQVVQGNLELTYLPTNASLSFLQDIQEVQGYVLIAHNQVRQVPLQRLRIVRGTQLFEDNYALAVLDNGDPLNNTTPVTGASPGGLRELQLRSLTEILKGGVLIQRNPQLCYQDTILWKDIFHKNNQLALTLIDTNRSRACHPCSPMCKGSRCWGESSEDCQSLTRTVCAGGCARCKGPLPTDCCHEQCAAGCTGPKHSDCLACLHFNHSGICELHCPALVTYNTDTFESMPNPEGRYTFGASCVTACPYNYLSTDVGSCTLVCPLHNQEVTAEDGTQRCEKCSKPCARGTHSLPPRPAAVPVPLRMQPGPAHPVLSFLRPSWDLVSAFYSLPLAPLSPTSVPISPVSVGRGPDPDAHVAVDLSRYEG

SEQ ID NO: 168 - protein, 331 aa, Artificial Sequence
  ERBB3.d BUILD 31
MRANDALQVLGLLFSLARGSEVGNSQAVCPGTLNGLSVTGDAENQYQTLYKLYERCEVVMGNLEIVLTGHNADLSFLQWIREVTGYVLVAMNEFSTLPLPNLRVVRGTQVYDGKFAIFVMLNYNTNSSHALRQLRLTQLTEILSGGVYIEKNDKLCHMDTIDWRDIVRDRDAEIVVKDNGRSCPPCHEVCKGRCWGPGSEDCQTLTKTICAPQCNGHCFGPNPNQCCHDECAGGCSGPQDTDCFACRHFNDSGACVPRCPQPLVYNKLTFQLEPNPHTKYQYGGVCVASCPHNFVVDQTSCVRACPPDKMEVDKNGLKMCEPCGGLCPKAF

SEQ ID NO: 169 - DNA, 878 bp, Homo Sapiens
  CDS (9)...(695): SR001E12
gaactgggatgtggagctggaagtgcctcctcttctgggctgtgctggtcacagccacactctgcaccgctaggccgtccccgaccttgcctgaacaagatgctctcccctcctcggaggatgatgatgatgatgatgactcctcttcagaggagaaagaaacagataacaccaaaccaaaccccgtagctccatattggacatccccagaaaagatggaaaagaaattgcatgcagtgccggctgccaagacagtgaagttcaaatgcccttccagtgggaccccaaaccccacactgcgctggttgaaaaatggcaaagaattcaaacctgaccacagaattggaggctacaaggtccgttatgccacctggagcatcataatggactctgtggtgccctctgacaagggcaactacacctgcattgtggagaatgagtacggcagcatcaaccacacataccagctggatgtcgtggagcggtcccctcaccggcccatcctgcaagcagggttgcccgccaacaaaacagtggccctgggtagcaacgtggagttcatgtgtaaggtgtacagtgacccgcagccgcacatccagtggctaaagcacatcgaggtgaatgggagcaagattggcccagacaacctgccttatgtccagatcttgaagccctggaagagaggccggcagtgatgacctcgcccctgtacctggagatcatcatctattgcacaggggccttcctcatctcctgcatggtggggtcggtcatcgtctacaagatgaagagtggtaccaagaagagtgacttccacagccagatggctgtgcacaagctggccaagagcatccctctgcgcagacaggtaacagaaa

SEQ ID NO: 170 - protein, 228 aa, Homo Sapiens
  SR001E12
MWSWKCLLFWAVLVTATLCTARPSPTLPEQDALPSSEDDDDDDDSSSEEKETDNTKPNPVAPYWTSPEKMEKKLHAVPAAKTVKFKCPSSGTPNPTLRWLKNGKEFKPDHRIGGYKVRYATWSIIMDSVVPSDKGNYTCIVENEYGSINHTYQLDVVERSPHRPILQAGLPANKTVALGSNVEFMCKVYSDPQPHIQWLKHIEVNGSKIGPDNLPYVQILKPWKRGRQ

SEQ ID NO: 171 - DNA, 965 bp, Homo Sapiens
  SR022C02
atgtggagctggaagtgcctcctcttctgggctgtgctggtcacagccacactctgcaccgctaggccgtccccgaccttgcctgaacaagatgctctcccctcctcggaggatgatgatgatgatgatgactcctcttcagaggagaaagaaacagataacaccaaaccaaaccgtatgcccgtagctccatattggacatccccagaaaagatggaaaagaaattgcatgcagtgccggctgccaagacagtgaagttcaaatgcccttccagtgggaccccaaaccccacactgcgctggttggaaaatggcaaagaattcaaacctggccacagaattggaggctacaaggtccgttatgccacctggagcatcataatggactctgtggtgccctctgacaagggcaactacacctgcattgtggagaatgagtacggcagcatcaaccacacataccagctggatgtcgtggagcggtcccctcaccggcccatcctgcaagcagggttgcccgccaacaaaacagtggccctgggtagcaacgtggagttcatgtgtaaggtgtacagtgacccgcagccgcacatccagtggctaaagcacatcgaggtgaatgggagcaagattggcccggacaacctgccttatgtccagatcttgaagactgctggagttaataccaccgacaaagagatggaggtgcttcacttaagaaatgtctcctttgaggacgcaggggagtatacgtgcttggcgggtaactctatcggactctcccatcactctgcatggttgaccgttctggaaggtacacactgtaacttctcctctcgatgtcctgccctcgccacgggcacggggggagcatgcatttccaggcttggggagacacagaggcaggagagctggaagaatgggctcctgcctgcctggtgccacatcctgccccagctttgagg

SEQ ID NO: 172 - protein, 320 aa, Homo Sapiens [sequence omitted]

SEQ ID NO: 173 - DNA, 801 bp, Homo Sapiens
  SR022C10
atggtcagctggggtcgtttcatctgcctggtcgtggtcaccatggcaaccttgtccctggcccggccctccttcagtttagttgaggataccacattagagccagaagagccaccaaccaaataccaaatctctcaaccagaagtgtacgtggctgcgccaggggagtcgctagaggtgcgctgcctgttgaaagatgccgccgtgatcagttggactaaggatggggtgcacttggggcccaacaataggacagtgcttattggggagtacttgcagataaagggcgccacgcctagagactccggcctctatgcttgtactgccagtaggactgtagacagtgaaacttggtacttcatggtgaatgtcacagatgccatctcatccggagatgatgaggatgacaccgatggtgcggaagattttgtcagtgagaacagtaacaacaagagagcaccatactggaccaacacagaaaagatggaaaagcggctccatgctgtgcctgcggccaacactgtcaagtttcgctgcccagccggggggaacccaatgccaaccatgcggtggctgaaaaacgggaaggagtttaagcaggagcatcgcattggaggctacaaggtacgaaaccagcactggagcctcattatggaaagtgtggtcccatctgacaagggaaattatacctgtgtggtggagaatgaatacgggtccatcaatcacacgtaccacctggatgttgtgggtgagtctgcctctcctcgtgtggcggctgcataccagcccattcttgcttga

SEQ ID NO: 174 - protein, 266 aa, Homo Sapiens [sequence omitted]

SEQ ID NO: 175 - DNA, 953 bp, Homo Sapiens
  SR022C11
atggtcagctggggtcgtttcatctgcctggtcgtggtcaccatggcaaccttgtccctggcccggccctccttcagtttagttgaggataccacattagagccagaagagccaccaaccaaataccaaatctctcaaccagaagtgtacgtggctgcgccaggggagtcgctagaggtgcgctgcctgttgaaagatgccgccgtgatcagttggactaaggatggggtgcacttggggcccaacaataggacagtgcttattggggagtacttgcagataaagggcgccacgcctagagactccggcctctatgcttgtactgccagtaggactgtagacagtgaaacttggtacttcatggtgaatgtcacagatgccatctcatccggagatgatgaggatgacaccgatggtgcggaagattttgtcagtgagaacagtaacaacaagagagcaccatactggaccaacacagaaaagatggaaaagcggctccatgctgtgcctgcggccaacactgtcaagtttcgctgcccagccggggggaacccaatgccaaccatgcggtggctgaaaaacgggaaggagtttaagcaggagcatcgcattggaggctacaaggtacgaaaccagcactggagcctcattatggaaagtgtggtcccatctgacaagggaaattatacctgtgtggtggagaatgaatacgggtccatcaatcacacgtaccacctggatgttgtggagcgatcgcctcaccggcccatcctccaagccggactgccggcaaatgcctccacagtggtcggaggagacgtagagtttgtctgcaaggtttacagtgatgcccagccccacatccagtggatcaagcacgtggaaaagaacggcagtaaatacgggcccgacgggctgccctacctcaaggttctcaaggtgaggactttctg

SEQ ID NO: 176 - protein, 317 aa, Homo Sapiens
  SR022C11
MVSWGRFICLVVVTMATLSLARPSFSLVEDTTLEPEEPPTKYQISQPEVYVAAPGESLEVRCLLKDAAVISWTKDGVHLGPNNRTVLIGEYLQIKGATPRDSGLYACTASRTVDSETWYFMVNVTDAISSGDDEDDTDGAEDFVSENSNNKRAPYWTNTEKMEKRLHAVPAANTVKFRCPAGGNPMPTMRWLKNGKEFKQEHRIGGYKVRNQHWSLIMESVVPSDKGNYTCVVENEYGSINHTYHLDVVERSPHRPILQAGLPANASTVVGGDVEFVCKVYSDAQPHIQWIKHVEKNGSKYGPDGLPYLKVLKVRTF

SEQ ID NO: 177 - DNA, 844 bp, Homo Sapiens
  SR022D04
atggtcagctggggtcgtttcatctgcctggtcgtggtcaccatggcaaccttgtccctggcccggccctccttcagtttagttgaggatatcacattagagccagaaggagcaccatactggaccaacacagaaaagatggaaaagcggctccatgctgtgcctgcggccaacactgtcaagtttcgctgcccagccggggggaacccaatgccaaccatgcggtggctgaaaaacgggaaggagtttaagcaggagcatcgcattggaggctacaaggtacgaaaccagcactggagcctcattatggaaagtgtggtcccatctgacaagggaaattatacctgtgtggtggagaatgaatacgggtccatcaatcacacgtaccacctggatgttgtggagcgatcgcctcaccggcccatcctccaagccggactgccggcaaatgcctccacagtggtcggaggagacgtagagtttgtctgcaaggtttacagtgatgcccagccccacatccagtggatcaagcacgtggaaaagaacggcagtaaatacgggcccgacgggctgccctacctcaaggttctcaaggccgccggtgttaacaccacggacaaagagattgaggttctctatattcggaatgtaacttttgaggacgctggggaatatacgtgcttggcgggtaattctattgggatatcctttcactccgcatggttgacagttctgccaggtatatactgttctttctctctgggtttttttcctttttcttggttgactgctataaaattaacacagcttctgttatcagaaatggccccttttatccttgcat

SEQ ID NO: 178 - protein, 281 aa, Homo Sapiens [sequence omitted]

SEQ ID NO: 179 - DNA, 1191 bp, Homo Sapiens
  SR022D06
atggtcagctggggtcgtttcatctgcctggtcgtggtcaccatggcaaccttgtccctggcccggccctccttcagtttagttgaggataccacattagagccagaagagccaccaaccaaataccaaatctctcaaccagaagtgtacgtggctgcgccaggggagtcgctagaggtgcgctgcctgttgaaagatgccgccgtgatcagttggactaaggatggggtgcacttggggcccaacaataggacagtgcttattggggagtacttgcagataaagggcgccacgcctagagactccggcctctatgcttgtactgccagtaggactgtagacagtgaaacttggtacttcatggtgaatgtcacagatgccatctcatccggagatgatgaggatgacaccgatggtgcggaagattttgtcagtgagaacagtaacaacaagagagcaccatactggaccaacacagaaaagacggaaaagcggctccatgctgtgcctgcggccaacactgtcaagtttcgctgcccagccggggggaacccaatgccaaccatgcggtggctgaaaaacgggaaggagtttaagcaggagcatcgcattggaggctacaaggtacgaaaccagcactggagcctcattatggaaagtgtggtcccatctgacaagggaaattatacctgtgtggtggagaatgaatacgggtccatcaatcacacgtaccacctggatgttgtggagcgatcgcctcaccggcccatcctccaagccggactgccggcaaatgcctccacagtggtcggaggagacgtagagtttgtctgcaaggtttacagtgatgcccagccccacatccagtggatcaagcacgtggaaaagaacggcagtaaatacgggcccgacgggctgccctacctcaaggttctcaaggccgccggtgttaacaccacggacaaagagattgaggttctctatattcggaatgtaacttttgaggacgctggggaatatacgtgcttggcgggtaattctattgggatatcctttcactctgcatggttgacagttctgccaggtatatactgttctttctctctgggtttttttcccttttcttggttgactgctataaaattaacacagcttctgttatcagaaatggccccttttatccttgcataa

SEQ ID NO: 180 - protein, 396 aa, Homo Sapiens [sequence omitted]

SEQ ID NO: 181 - protein, 366 aa, Artificial Sequence
  FGFR2.b BUILD 31
MVSWGRFICLVVVTMATLSLARPSFSLVEDTTLEPEEPPTKYQISQPEVYVAAPGESLEVRCLLKDAAVISWTKDGVHLGPNNRTVLIGEYLQIKGATPRDSGLYACTASRTVDSETWYFMVNVTDAISSGDDEDDTDGAEDFVSENSNNKRAPYWTNTEKMEKRLHAVPAANTVKFRCPAGGNPMPTMRWLKNGKEFKQEHRIGGYKVRNQHWSLIMESVVPSDKGNYTCVVENEYGSINHTYHLDVVERSPHRPILQAGLPANASTVVGGDVEFVCKVYSDAQPHIQWIKHVEKNGSKYGPDGLPYLKVLKHSGINSSNAEVLALFNVTEADAGEYICKVSNYIGQANQSAWLTVLPKQQGRRC

SEQ ID NO: 182 - DNA, 713 bp, Homo sapiens
  SR002A11
tgggtccctgagagctgtgagaaggagatgcggctgctgctggccctgttgggggtcctgctgagtgtgcctgggcctccagtcttgtccctggaggcctctgaggaagtggagcttgcaagcattcatctatcactgtgtctgcgagagaggactggccttgcagggcgcagggccctaagctgggctgcagagctggtgagccctgcctggctcccagcctggagcagcaagagcaggagctgacagtagcccttgggcagcctgtgcgtctgtgctgtgggcgggctgagcgtggtggccactggtacaaggagggcagtcgcctggcacctgctggccgtgtacggggctggaggggccgcctagagattgccagcttcctacctgaggatgctggccgctacctctgcctggcacgaggctccatgatcgtcctgcagaatctcaccttgattacaggtgactccttgacctccagcaacgatgatgaggaccccaagtcccatagggacccctcgaataggcacagttacccccagcaagcaccctactggacacacccccagcgcatggagaagaaactgcatgcagtacctgcggggaacaccgtcaagttccgctgtccagctgcaggcaaccccacgcccaccatccgctggcttaaggatggacaggcctttcatggggagaaccgcattggaggcattcgg

SEQ ID NO: 183 - protein, 72 aa, Homo sapiens
  SR002A11
MRLLLALLGVLLSVPGPPVLSLEASEEVELASIHLSLCLRERTGLAGRRALSWAAELVSPAWLPAWSSKSRS

SEQ ID NO: 184 - DNA, 1775 bp, Homo Sapiens
  CDS (26)...(1366): SR002A10
ggtccctgagagctgtgagaaggagatgcggctgctgctggccctgttgggggtcctgctgagtgtgcctgggcctccagtcttgtccctggaggcctctgaggaagtggagcttgagccctgcctggctcccagcctggagcagcaagagcaggagctgacagtagcccttgggcagcctgtgcgtctgtgctgtgggcgggctgagcgtggtggccactggtacaaggagggcagtcgcctggcacctgctggccgtgtacggggctggaggggccgcctagagattgccagcttcctacctgaggatgctggccgctacctctgcctggcacgaggctccatgatcgtcctgcagaatctcaccttgattacaggtgactccttgacctccagcaacgatgatgaggaccccaagtcccatagggacccctcgaataggcacagttacccccagcaagcaccctactggacacacccccagcgcatggagaagaaactgcatgcagtacctgcggggaacaccgtcaagttccgctgtccagctgcaggcaaccccacgcccaccatccgctggcttaaggatggacaggcctttcatggggagaaccgcattggaggcattcggctgcgccatcagcactggagtctcgtgatggagagcgtggtgccctcggaccgcggcacatacacctgcctggtagagaacgctgtgggcagcatccgctataactacctgctagatgtgctggagcggtccccgcaccggcccatcctgcaggccgggctcccggccaacaccacagccgtggtgggcagcgacgtggagctgctgtgcaaggtgtacagcgatgcccagccccacatccagtggctgaagcacatcgtcatcaacggcagcagcttcggagccgacggtttcccctatgtgcaagtcctaaagactgcagacatcaatagctcagaggtggaggtcctgtacctgcggaacgtgtcagccgaggacgcaggcgagtacacctgcctcgcaggcaattccatcggcctctcctaccagtctgcctggctcacggtgctgccaggtgagcacctgaagggccaggagatgctgcgagatgcccctctgggccagcagtgggggctgtggcctgttgggtggtcagtctctgttggcctgtggggtctggcctggggggcagtgtgtggatttgtgggtttgagctgtatgacagcccctctgtgcctctccacacgtggccgtccatgtgaccgtctgctgaggtgtgggtgcctgggactgggcataactacagcttcctccgtgtgtgtccccacatatgttgggagctgggagggactgagttagggtgcacggggcggccagtctcaccactgaccagtttgtctgtctgtgtgtgtccatgtgcgagggcagaggaggaccccacatggaccgcagcagcgcccgaggccaggtatacggacatcatcctgtacgcgtcgggctccctggccttggctgtgctcctgctgctggccgggctgtatcgagggcaggcgctccacggccggcacccccgcccgcccgccactgtgcagaagctctcccgcttccctctggcccgacagttctccctggagtcaggctcttccggcaagtcaagctcatccctggtacgaggcgtgcgtctctcctccagcggccccgccttgctcgccggcctcgtgagtctagatctacctctcgacccactatgggagttcccccgggacag

SEQ ID NO: 185 - protein, 446 aa, Homo Sapiens
  SR002A10
MRLLLALLGVLLSVPGPPVLSLEASEEVELEPCLAPSLEQQEQELTVALGQPVRLCCGRAERGGHWYKEGSRLAPAGRVRGWRGRLEIASFLPEDAGRYLCLARGSMIVLQNLTLITGDSLTSSNDDEDPKSHRDPSNRHSYPQQAPYWTHPQRMEKKLHAVPAGNTVKFRCPAAGNPTPTIRWLKDGQAFHGENRIGGIRLRHQHWSLVMESVVPSDRGTYTCLVENAVGSIRYNYLLDVLERSPHRPILQAGLPANTTAVVGSDVELLCKVYSDAQPHIQWLKHIVINGSSFGADGFPYVQVLKTADINSSEVEVLYLRNVSAEDAGEYTCLAGNSIGLSYQSAWLTVLPGEHLKGQEMLRDAPLGQQWGLWPVGWSVSVGLWGLAWGAVCGFVGLSCMTAPLCLSTRGRPCDRLLRCGCLGLGITTASSVCVPTYVGSWEGLS

SEQ ID NO: 186 - protein, 209 aa, Homo sapiens
  FGFR4.d BUILD 31
MMRTPSPIGTPRIGTVTPSKVSRSPRTCVPAAAHLITEKRRPVWEHTVILGAFPCPPAPYWTHPQRMEKKLHAVPAGNTVKFRCPAAGNPTPTIRWLKDGQAFHGENRIGGIRLRHQHWSLVMESVVPSDRGTYTCLVENAVGSIRYNYLLDVLERSPHRPILQAGLPANTTAVVGSDVELLCKVYSDAQPHIQWLKHIVINGSSFGAD

SEQ ID NO: 187 - DNA, 1240 bp, Homo Sapiens
  SR020C10
atgaaggcccccgctgtgcttgcacctggcatcctcgtgctcctgtttaccttggtgcagaggagcaatggggagtgtaaagaggcactagcaaagtccgagatgaatgtgaatatgaagtatcagcttcccaacttcaccgcggaaacacccatccagaatgtcattctacatgagcatcacattttccttggtgccactaactacatttatgttttaaatgaggaagaccttcagaaggttgctgagtacaagactgggcctgtgctggaacacccagattgtttcccatgtcaggactgcagcagcaaagccaatttatcaggaggtgtttggaaagataacatcaacatggctctagttgtcgacacctactatgatgatcaactcattagctgtggcagcgtcaacagagggacctgccagcgacatgtctttccccacaatcatactgctgatatacagtcggaggttcactgcatattctccccacagatagaagagcccagccagtgtcctgactgtgtggtgagcgccctgggagccaaagtcctttcatctgtaaaggaccggttcatcaacttctttgtaggcaataccataaattcttcttatttcccagatcatccattgcattcgatatcagtgagaaggctaaaggaaacgaaagatggttttatgtttttgacggaccagtcctacattgatgttttacctgagttcagagattcttaccccattaagtatgtccatgcctttgaaagcaacaattttatttacttcttgacggtccaaagggaaactctagatgctcagacttttcacacaagaataatcaggttctgttccataaactctggattgcattcctacatggaaatgcctctggagtgtattctcacagaaaagagaaaaaagagatccacaaagaaggaagtgttaaatatacttcaggctgcgtatgtcagcaagcctggggcccagcttgctaggcaaataggagccagcctgaatgatgacattcttttcggggtgttcgcacaaagcaagccagattctgccgaaccaatggatcgatctgccatgtgtgcattccctatcaaatatgtcaacgacttcttcaacaagatcgtcaacaaaaacaatgtgagatgtctccagcatttttacggacccaatcatgagcactgctttaatagggtaagtcacatcagttccccacttataaactgtgaggtat

SEQ ID NO: 188 - protein, 413 aa, Homo Sapiens [sequence omitted]

SEQ ID NO: 189 - DNA, 1405 bp, Homo Sapiens
  SR020C12
atgaaggcccccgctgtgcttgcacctggcatcctcgtgctcctgtttaccttggtgcagaggagcaatggggagtgtaaagaggcactagcaaagtccgagatgaatgtgaatatgaagtatcagcttcccaacttcaccgcggaaacacccatccagaatgtcattctacatgagcatcacattttccttggtgccactaactacatttatgttttaaatgaggaagaccttcagaaggttgctgagtacaagactgggcctgtgctggaacacccagattgtttcccatgtcaggactgcagcagcaaagccaatttatcaggaggtgtttggaaaaataacatcaacatggctctagttgtcgacacctactatgatgatcaactcattagctgtggcagcgtcaacagagggacctgccagcgacatgtctttccccacaatcatactgctgacatacagtcggaggttcactgcatattctccccacagatagaagagcccagccagtgtcctgactgtgtggtgagcgccctgggagccaaagtcctttcatctgtaaaggaccggttcatcaacttctttgtaggcaataccataaattcttcttatttcccagatcatccattgcattcgatatcagtgagaaggctaaaggaaacgaaagatggttttatgtttttgacggaccagtcctacattgatgttttacctgagttcagagattcttaccccattaagtatgtccatgcctttgaaagcaacaattttatttacttcttgacggtccaaagggaaactctagatgctcagacttttcacacaagaataatcaggttctgttccataaactctggattgcattcctacatggaaatgcctctggagtgtattctcacagaaaagagaaaaaagagatccacaaagaaggaagtgtttaatatacttcaggctgcgtatgtcagcaagcctggggcccagcttgctagacaaataggagccagcctgaatgatgacattcttttcggggtgttcgcacaaagcaagccagattctgccgaaccaatggatcgatctgccatgtgtgcattccctatcaaatatgtcaacgacttcttcaacaagatcgtcaacaaaaacaatgtgagatgtctccagcatttttacggacccaatcatgagcactgctttaataggacacttctgagaaattcatcaggctgtgaagcgcgccgtgatgaatatcgaacagagtttaccacagctttgcagcgcgttgacttattcatgggtcaattcagcgaagtcctcttaacatctatatccaccttcattaaaggagacctcaccatagctaatcttgggacatcagagggtcgcttcatgcaggtaagtgctttct

SEQ ID NO: 190 - protein, 468 aa, Homo Sapiens [sequence omitted]

SEQ ID NO: 191 - DNA, 1557 bp, Homo Sapiens
  SR020D04
atgaaggcccccgctgtgcttgcacctggcatcctcgtgctcctgtttaccttggtgcagaggagcaatggggagtgtaaagaggcactagcaaagtccgagatgaatgtgaatatgaagtatcagcttcccaacttcaccgcggaaacacccatccagaatgtcattctacatgagcatcacattttccttggtgccactaactacatttatgttttaaatgaggaagaccttcagaaggttgctgagtacaagactgggcctgtgctggaacacccagattgtttcccatgtcaggactgcagcagcaaagccaatttatcaggaggtgtttggaaagataacattaacatggctctagttgtcgacacctactatgatgatcaactcattagctgtggcagcgtcaacagagggacctgccagcgacatgtctttccccacaatcatactgctgacatacagtcggaggttcactgcatattctccccacagatagaagagcccagccagtgtcctgactgtgtggtgagcgccctgggagccaaagtcctttcatctgtaaaggaccggttcatcaacttctttgtaggcaataccataaattcttcttatttcccagatcatccattgcattcgatatcagtgagaaggctaaaggaaacgaaagatggttttatgtttttgacggaccagtcctacattgatgttttacctgagttcagagattcttaccccattaagtatgtccatgcctttgaaagcaacaattttatttacttcttgacggtccaaagggaaactctagatgctcagacttttcacacaagaataatcaggttctgttccataaactctggattgcattcctacatggaaatgcctctggagtgtattctcacagaaaagagaaaaaagagatccacaaagaaggaagtgtttaatatacttcaggctgcgtatgtcagcaagcctggggcccagcttgctagacaaataggagccagcctgaatgatgtcattcttttcggggtgttcgcacaaagcaagccagattctgccgaaccaatggatcgatctgccatgtgtgcattccctatcaaatatgtcaacgacttcttcaacaagatcgtcaacaaaaacaatgtgagatgtctccagcatttttacggacccaatcatgagcactgctttaataggacacttctgagaaattcatcaggctgtgaagcgcgccgtgatgaatatcgaacagagtttaccacagctttgcagcgcgttgacttattcatgggtcaattcagcgaagtcctcttaacatctatatccaccttcattaaaggagacctcaccatagctaatcttgggacatcagagggtcgcttcatgcaggttgtggtttctcgatcaggaccatcaacccctcatgtgaattttctcctggactcccatccagtgtctccagaagtgattgtggagcatacattaaaccaaaatgactacacactggttatcactgggaaggaggtaagctgttcccacagggaatttccatga

SEQ ID NO: 192 - protein, 518 aa, Homo Sapiens [sequence omitted]

SEQ ID NO: 193 - DNA, 1789 bp, Homo Sapiens
  SR020D07
atgaaggcccccgctgtgcttgcacctggcatcctcgtgctcctgtttaccttggtgcagaggagcaatggggagtgtaaagaggcactagcaaagtccgagatgaatgtgaatatgaagtatcagcttcccaacttcaccgcggaaacacccatccagaatgtcattctacatgagcatcacattttccttggtgccactaactacatttatgttttaaatgaggaagaccttcagaaggttgctgagtacaagactgggcctgtgctggaacacccagattgtttcccatgtcaggactgcagcagcaaagccaatttatcaggaggtgtttggaaagataacatcaacatggctctagttgtcgacacctactatgatgatcaactcattagctgtggcagcgtcaacagagggacctgccagcgacatgtctttccccacaatcatactgctgacatacagtcggaggttcactgcatattctccccacagatagaagagcccagccagtgtcctgactgtgtggtgagcgccctgggagccaaagtcctttcatctgtaaaggaccggttcatcaacttctttgtaggcaataccataaattcttcttatttcccagatcatccattgcattcgatatcagtgagaaggctaaaggaaacgaaagatggttttatgtttttgacggaccagtcctacattgatgttttacctgagttcagagattcttaccccattaagtatgtccatgcctttgaaagcaacaattttatttacttcttgacggtccaaagggaaactctagatgctcagacttttcacacaagaataatcaggttctgttccataaactctggattgcattcctacatggaaatgcctctggagtgtattctcacagaaaagagaaaaaagagatccacaaagaaggaagtgtttaatatacttcaggctgcgtatgtcagcaagcctggggcccagcttgctagacaaataggagccagcccgaatgatgacattcttttcggggtgttcgcacaaagcaagccagattctgccgaaccaatggatcgatctgccatgtgtgcattccctatcaaatatgtcaacgacttcttcaacaagatcgtcaacaaaaacaatgtgagatgtctccagcatttttacggacccaatcatgagcactgctttaataggacacttctgagaaattcatcaggctgtgaagcgcgccgtgatgaatatcgaacagagtttaccacagctttgcagcgcgttgacttattcatgggtcaattcagcgaagtcctcttaacatctatatccaccttcattaaaggagacctcaccatagctaatcttgggacatcagagggtcgcttcatgcaggttgtggtttctcgatcaggaccatcaacccctcatgtgaattttctcctggactcccatccagtgtctccagaagtgattgtggagcatacattaaaccaaaatggctacacactggttatcactgggaagaagatcacgaagatcccattgaatggcttgggctgcagacatttccagtcctgcagtcaatgcctctctgccccaccctttgttcagtgtggctggtgccacgacaaatgtgtgcgatcggaggaatgcctgagcgggacatggactcaacagatctgtctgcctgcaatctacaaggtaggaatctctaacagctggcatacatgtttttgtttggtgttttttttttttttttggtttggtttggtttgttttttgttttttt

SEQ ID NO: 194 - protein, 596 aa, Homo Sapiens [sequence omitted]

SEQ ID NO: 195 - DNA, 1936 bp, Homo Sapiens
  SR020D11
atgaaggcccccgctgtgcttgcacctggcatcctcgtgctcctgtttaccttggtgcagaggagcaatggggagtgtaaagaggcactagcaaagtccgagatgaatgtgaatatgaagtatcggcttcccaacttcaccgcggaaacacccatccagaatgtcattctacatgagcatcacattttccttggtgccactaactacatttatgttttaaatgaggaagaccttcagaaggttgctgagtacaagactgggcctgtgctggaacacccagattgtttcccatgtcaggactgcagcagcaaagccaatttatcaggaggtgtttggagagataacatcaacatggctctagttgtcgacacctactatgatgatcaactcattagctgtggcagcgtcaacagagggacctgccagcgacatgcctttccccacaatcatactgctgacatacagtcggaggttcactgcatattctccccacagatagaagatcccagccagtgtcctgactgtgtggtgagcgccctgggagccaaagtcctttcatctgtaaaggaccggttcatcaacttctttgtaggcaataccataaattcttcttatttcccagatcatccattgcattcgatatcattgagaaggctaaaggaaacgaaagatggttttatgtttttgacggaccagtcctacattgatgttttacctgagttcagagattcttaccccattaagtatgtccatgcctttgaaagcaacaattttatttacttcttgacggtccaaagggaaactctagatgctcagacttttcacgcaagaataatcaggttctgttccataaactctggattgcattcctacatggaaatgcctctggagtgtattctcacagagaagagaaaaaagagatccacaaagaaggaagtgtttaatatacttcaggctgcgtatgtcagcaagcctggggcccagcttgctagacaaataggagccagcctgaatgatgacattcttttcggggtgttcgcacaaagcaagccagattctgccgaaccaatggatcgatctgccatgtgtgcattccctatcaaatatgtcaacgacttcttcaacaagatcgtcaacaaaaacaatgtgagatgtctccagcatttttacggacccaatcatgagcactgctttaatagggcagaaaatgtgctagattggaggtgaagaccctggagccagagagcctaggcttagtcctagccctgcactgaagacacttctgagaaattcatcaggctgtgaagcgcgccgtgatgaatatcgaacagagtttaccacagctttgcagcgcgttgacttattcatgggtcaattcagcgaagtcctcttaacatctatatccaccttcattaaaggagacctcaccatagctaatcttgggacatcagagggtcgcttcatgcaggttgtggtttctcgatcaggaccatcaacccctcatgtgaattttctcctggactcccatccagtgtctccagaagtgattgtggagcatacattaaaccaaaatggctacacactggttatcactgggaagaagatcacgaagatcccattgaatggcttgggctgcagacatttccagtcctgcagtcaatgcctctctgccccaccctttgttcagtgtggctggtgccacaacaaatgtgtgcgatcggaggaatgcctgagcgggacatggactcaacagatctgtctgcctgcaatctacaaggtaggaatctctaacagctggcatacatgtttttgtttggtgttttttttttttttttggtttggtttggtttgttttttgtttttttagatacaaatcccactaatgaaaaaaatttaaaaatcaatttactcatttagctgtgagtcatcagctaaa

SEQ ID NO: 196 - protein, 408 aa, Homo Sapiens [sequence omitted]

SEQ ID NO: 197 - DNA, 1888 bp, Homo Sapiens
  SR020E11
atgaaggcccccgctgtgcttgcacctggcatcctcgtgctcctgtttaccttggtgcagaggagcaatggggagtgtaaagaggcactagcaaagtccgagatgaatgtgaatatgaagtatcagcttcccaacttcaccgcggaaacacccatccagaatgtcattctacatgagcatcacattttccttggtgccactaactacatttatgttttaaatgaggaagaccttcagaaggttgctgagtacaagactgggcctgtgctggaacacccagattgtttcccatgtcaggactgcagcagcaaagccaatttatcaggaggtgtttggaaagataacatcaacatggctctagttgtcgacacctactatgatgatcaactcattagctgtggcagcgtcaacagagggacctgccagcgacatgtctttccccacaatcatactgctgacatacagtcggaggctcactgcatattctccccacagatagaagagcccagtcagtgtcctgactgtgtggtgagcgccctgggagccaaagtcctttcatctgtaaaggaccggttcatcaacttctttgtaggcaataccataaattcttcttatttcccagatcatccattgcattcgatatcagtgagaaggctaaaggaaacgaaagatggttttatgtttttgacggaccagtcctacattgatgttttacctgagttcagagattcttaccccattaagtatgtccatgcctttgaaagcaacaattttatttacttcttgacggtccaaagggaaactctagatgctcagacttttcacacaagaataatcaggttctgttccataaactctggattgcattcctacatggaaatgcctctggagtgtattctcacagaaaagagaaaaaagagatccacaaagaaggaagtgtttaatatacttcaggctgcgtatgtcagcaagcctggggcccagcttgctagacaaataggagccagcctgaatgatgacattcttttcggggtgttcgcacaaagcaagccagattctgccgaaccaatggatcgatctgccatgtgtgcattccctatcaaatatgtcaacgacttcttcaacaagatcgtcaacaaaaacaatgtgagatgtctccagcatttttacggacccaatcatgagcactgctttaataggacacttctgagaaattcatcaggctgtgaagcgcgccgtgatgaatatcgaacagagtttaccacagctttgcagcgcgttgacttattcatgggtcaattcagcgaagtcctcttaacatctatatccaccttcattaaaggagacctcaccatagctaatcttgggacatcagagggtcgcttcatgcaggttgtggtttctcgatcaggaccatcaacccctcatgtgaattttctcctggactcccatccagtgtctccagaagtgattgtggagcatacattaaaccaaaatggctacacactggttatcactgggaagaagatcacgaagatcccattgaatggcttgggctgcagacatttccagtcctgcagtcaatgcctctctgccccaccctttgttcagtgtggctggtgccacgacaaatgtgtgcgatcggaggaatgcctgagcgggacatggactcaacagatctgtctgcctgcaatctacaaggttttcccaaatagtgcaccccttgaaggagggacaaggctgaccatatgtggctgggactttggatttcggaggaataataaatttgatttaaagaaaactagagttctccttggaaatgagagctgcaccttgactttaagtgagagcacgatgaatacgtaaggatcttaaaatgctttgctgg

SEQ ID NO: 198 - protein, 621 aa, Homo Sapiens [sequence omitted]

SEQ ID NO: 199 - DNA, 1995 bp, Homo Sapiens
  SR020F08
atgaaggcccccgctgtgcttgcacctggcatcctcgtgctcctgtttaccttggtgcagaggagcaatggggagtgtaaagaggcactagcaaagtccgagatgaatgtgaatatgaagtatcagcttcccaacttcaccgcggaaacacccatccagaatgtcattctacatgagcatcacattttccttggtgccactaactacatttatgttttaaatgaggaagaccttcagaaggttgctgagtacaagactgggcctgtgctggaacacccagattgtttcccatgtcaggactgcagcagcaaagccaatttatcaggaggtgtttggaaagataacatcaacatggctctagttgtcgacacctactatgatgatcaactcattagctgtggcagcgtcaacagagggacctgccagcgacatgtctttccccacaatcatactgctgacatacagtcggaggttcactgcatattctccccacagatagaagagcccagccagtgtcctgactgtgtggtgagcgccctgggagccaaagtcctttcatctgtaaaggaccggttcatcaacttctttgtaggcaataccataaattcttcttatttcccagatcatccattgcattcgatatcagtgagaaggctaaaggaaacgaaagatggttttatgtttttgacggaccagtcctacattgatgttttacctgagttcagagattcttaccccattaagtatgtccatgcctttgaaagcaacaattttatttacttcttgacggtccaaagggaaactctagatgctcagacttttcacacaagaataatcaggttctgttccataaactctggattgcattcctacatggaaatgcctctggagtgtattctcacagaaaagagaaaaaagagatccacaaagaaggaagtgtttaatatacttcaggctgcgtatgtcagcaagcctggggcccagcttgctagacaaataggagccagcctgaatgatgacattcttttcggggtgttcgcacaaagcaagccagattctgccgaaccaatggatcgatctgccatgtgtgcattccctatcaaatatgtcaacgacttcttcaacaagatcgtcaacaaaaacaatgtgagatgtctccagcatttttacggacccaatcatgagcactgctttaataggacacttctgagaaattcatcaggctgtgaagcgcgccgtgatgaatatcgaacagagtttaccacagctttgcagcgcgttgacttattcatgggtcaattcagcgaagtcctcttaacatctatatccaccttcattaaaggagacctcaccatagctaatcttgggacatcagagggtcgcttcatgcaggttgtggtttctcgatcaggaccatcaacccctcatgtgaattttctcatggactcccatccagtgtctccagaagtgattgtggagcatacattaaaccaaaatggctacacactggttatcactgggaagaagatcacgaagatcccattgaatggcttgggctgcagacatttccagtcctgcagtcaatgcctctctgccccaccctttgttcagtgtggctggtgccacgacaaatgtgtgcgatcggaggaatgcctgagcgggacatggactcaacagatctgtctgcctgcaatctacaaggttttcccaaatagtgcaccccttgaaggagggacaaggctgaccatatgtggctgggactttggatttcggaggaataataaatttgatttaaagaaaactagagttctccttggaaatgagagctgcaccttgactttaagtgagagcacgatgaatacattgaaatgcacagttggtcctgccatgaataagcatttcaatatgtccataattatttcaaatggccacgggacaacacaatacagtacattctcctatgtggtaaggaagattctatcctatcatgtttga

SEQ ID NO: 200 - protein, 664 aa, Homo Sapiens [sequence omitted]

SEQ ID NO: 201 - DNA, 2170 bp, Homo Sapiens
  SR020F11
atgaaggcccccgctgtgcttgcacctggcatcctcgtgctcctgtttaccctggtgcagaggagcaatggggagtgtaaagaggcactagcaaagtccgagatgaatgtgaatatgaagtatcagcttcccaacttcaccgcggaaacacccatccagaatgtcattctacatgagcatcacattttccttggtgccactaactacatttatgttttaaatgaggaagaccttcagaaggttgctgagtacaagactgggcctgtgctggaacacccagattgtttcccatgtcaggactgcagcagcaaagccaatttatcaggaggtgtttggaaagataacatcaacatggctctagttgtcgacacctactatgatgatcaactcattagctgtggcagcgtcaacagagggacctgccagcgacatgtctttccccacaatcatcctgctgacatacagtcggaggttcactgcatattctccccacagatagaagagcccagccagtgtcctgactgtgtggtgagcgccctgggagccaaagtcctttcatctgtaaaggaccggttcatcaacttctttgtaggcaataccataaattcttcttatttcccagatcatccattgcattcgatatcagtgagaaggctaaaggaaacgaaagatggttttatgtttttgacggaccagtcctacattgatgttttacctgagttcagagattcttaccccattaagtatgtccatgcctttgaaagcaacaattttatttacttcttgacggtccaaagggaaactctagatgctcagacttttcacacaagaataatcaggttctgttccataaactctggattgcattcctacatggaaatgcctctggagtgtattctcacagaaaagagaaaaaagagatccacaaagaaggaagtgtttaatatacttcaggctgcgtatgttagcaagcctggggcccagcttgctagacaaataggagccagcctgaatgatgacattcttttcggggtgttcgcacaaagcaagccagattctgccgaaccaatggatcgatctgccatgtgtgcattccctatcaaatatgtcaacgacttcttcaacaagatcgtcaacaaaaacaatgtgagatgtctccagcatttttacggacccaatcatgagcactgctttaataggacacttctgagaaattcatcaggctgtgaagcgcgccgtgatgaatatcgaacagagtttaccacagctttgcagcgcgttgacttattcatgggtcaattcagcgaagtcctcttaacatctatatccaccttcattaaaggagacctcaccatagctaatcttgggacatcagagggtcgcttcatgcaggttgtggtttctcgatcaggaccatcaacccctcatgtgaattttctcctggactcccatccagtgtctccagaagtgattgtggagcatacattaaaccaaaatggccacacactggttatcactgggaagaagatcacgaagatcccattgaatggcttgggctgcagacatttccagtcctgcagtcaatgcctctctgccccaccctttgttcagtgtggctggtgccacgacaaatgtgtgcgatcggaggaatgcctgagcgggacatggactcaacagatctgtctgcctgcaatctacaaggttttcccaaatagtgcaccccttgaaggagggacaaggctgaccatatgtggctgggactttggatttcggaggaataataaatttgatttaaagaaaactagagttctccttggaaatgagagctgcaccttgactttaagtgagagcacgatgaatacattgaaatgcacagttggtcctgccatgaataagcatttcaatatgtccataattatttcaaatggccacgggacaacacaatacagtacattctcctatgtggatcctgtaataacaagtatttcgccgaaatacggtcctatggctggtggcactttacttactttaactggaaattacctaaacagtgggaattctagacacatttcaattggtggaaaaacatgtactttaaaaaggtgttgtaaatttattttttgttgcatctgtcaatttgaattaatatctgtaccttaaaaattaagca

SEQ ID NO: 202 - protein, 719 aa, Homo Sapiens [sequence omitted]

SEQ ID NO: 203 - DNA, 2194 bp, Homo Sapiens
  SR020F12
atgaaggcccccgctgtgcttgcacctggcatcctcgtgctcctgtttaccttggtgcagaggagcaatggggagtgtaaagaggcactagcaaagtccgagatgaatgcgaatatgaagtatcagcttcccaacttcaccgcggaaacacccatccagaatgtcattctacatgagcatcacattttccttggtgccactaactacatttatgttttaaatgaggaagaccttcagaaggttgctgagtacaagactgggcctgtgctggaacacccagattgtttcccatgtcaggactgcagcagcaaagccaatttatcaggaggtgtttggaaagataacatcaacatggctctagttgtcgacacctactatgatgatcaactcattagctgtggcagcgtcaacagagggacctgccagcgacatgtctttccccacaatcatactgctgacatacagtcggaggttcactgcatattctccccacagatagaagagcccagccagtgtcctgactgtgtggtgagcgccctgggagccaaagtcctttcatctgtaaaggaccggttcatcaacttctttgtaggcaataccataaattcttcttatttcccagatcatccattgcattcgatatcagtgaggaggctaaaggaaacgaaagatggttttatgtttttgacggaccagtcctacattgatgttttacctgagttcagagattcttaccccattaagtatgtccatgcctttgaaagcaacaattttatttacttcttgacggtccaaagggaaactctagatgctcagacttttcacacaagaataatcaggttctgttccataaactctggattgcattcctacatggaaatgcctctggagtgtattctcacagaaaagagaaaaaagagatccacaaagaaggaagtgtttaatatacttcaggctgcgtatgtcagcaagcctggggcccagcttgctagacaaataggagccagcctgaatgatgacattcttttcggggtgttcgcacaaagcaagccagattctgccgaaccaatggatcgatctgccatgtgtgcattccctatcaaatatgtcaacgacttcttcaacaagatcgtcaacaaaaacaatgtgagatgtctccagcatttttacggacccaatcatgagcactgctttaataggacacttctgagaaattcatcaggctgtgaagcgcgccgtgatgaatatcgaacagagtttaccacagctttgcagcgcgttgacttattcatgggtcaattcagcgaagtcctcttaacatctatatccaccttcattaaaggagacctcaccatagctaatcttgggacatcagagggtcgcttcatgcaggttgtggtttctcgatcaggaccatcaacccctcatgtgaattttctcctggactcccatccagtgtctccagaagtgattgtggagcatacattaaaccaaaatggctacacactggttatcactgggaagaagatcacgaagaccccattgaatggcttgggctgcagacatttccagtcctgcagtcaatgcctctctgccccaccctttgttcagtgtggctggtgccacgacaaatgtgtgcgatcggaggaatgcctgagcgggacatggactcaacagatctgtctgcctgcaatctacaaggttttcccaaatagtgcaccccttgaaggagggacaaggctgaccatatgtggctgggactttggatttcggaggaataataaatttgatttaaagaaaactagagttctccttggaaatgagagctgcaccttgactttaagtgagagcacgatgaatacattgaaatgcacagttggtcctgccatgaataagcatttcaatatgtccataattatttcaaatggccacgggacaacacagtacagtacattctcctatgtgttactttgttttgtttttatctcccctccaggatcctgtaataacaagtatttcgccgaaatacggtcctatggctggtggcactttacttactttaactggaaattacctaaacagtgggaattctagacacatttcaattggtggaaaaacatgtactttaaaaaggtgttgtaaatttattttttgttgcatctgtcaatttgaattaatatctgtaccttaaaaa

SEQ ID NO: 204 - protein, 697 aa, Homo Sapiens [sequence omitted]

SEQ ID NO: 205 - DNA, 2082 bp, Homo Sapiens
  SR020G03
aatgaaggcccccgctgtgcttgcacctggcatcctcgtgctcctgtttaccttggtgcagaggagcaatggggagtgtaaagaggcactagcaaagtccgagatgaatgtgaatatgaagtatcagcttcccaacttcaccgcggaaacacccatccagaatgtcattctacatgagcatcacattttccttggtgccactaactacatttatgttttaaatgaggaagaccttcagaaggttgctgagtacaagactgggcctgtgctggaacacccagattgtttcccatgtcaggactgcagcagcaaagccaatttatcaggaggtgtttggaaagataacatcaacatggctctagttgtcgacacctactatgatgatcaactcattagctgtggcagcgtcaacagagggacctgccagcgacatgtctttccccacaatcatactgctgacatacagtcggaggttcactgcatattctccccacagatagaagagcccagccagtgtcctgactgtgtggtgagcgccctgggagccaaagtcctttcatctgtaaaggaccggttcatcaacttctttgtaggcaataccataaattcttcttatttcccagatcatccattgcattcgatatcagtgagaaggctaaaggaaacgaaagatggttttatgtttttgacggaccagtcctacattgatgttttacctgagttcagagattcttaccccattaagtatgtccatgcctttgaaagcaacaattttatttacttcttgacggtccaaagggaaactctagatgctcagacttttcacacaagaataatcaggttctgttccataaactctggattgcattcctacatggaaatgcctctggagtgtattctcacagaaaagagaaaaaagagatccacaaagaaggaagtgtttaatatacttcaggctgcgtatgtcagcaagcctggggcccagcttgctagacaaataggagccagcctgaatgatgacattcttttcggggtgttcgcacaaagcaagccagattctgccgaaccaatggatcgatctgccatgtgtgcattccctatcaaatatgtcaacgacttcttcaacaagatcgtcaacaaaaacaatgtgagatgtctccagcatttttacggacccaatcatgagcactgctttaataggacacttctgagaaattcatcaggctgtgaagcgcgccgtgatgaatatcgaacagagtttaccacagctttgcagcgcgttgacttattcatgggtcaattcagcgaagtcctcttaacatctatatccaccttcattaaaggagacctcaccatagctaatcttgggacatcagagggtcgcttcatgcaggttgtggtttctcgatcaggaccatcaacccctcatgtgaattttctcctggactcccatccagtgtctccagaagtgattgtggagcatacattaaaccaaaatggctacacactggttatcactgggaagaagtgtggctggcgccacgacaaatgtgtgcgatcggaggaatgcctgagcgggacatggactcaacagatctgtctgcctgcaatctacaaggttttcccaaatagtgcaccccttgaaggagggacaaggctgaccatatgtggctgggactttggatttcggaggaataataaatttgatttaaagaaaactagagttctccttggaaatgagagctgcaccttgactttaagtgagagcacgatgaatacattgaaatgcacagttggtcctgccatgaataagcatttcaatatgtccataattatttcaaatggccacgggacaacacaatacagtacattctcctatgtggatcctgtaataacaagtatttcgccgaaatacggtcctatggctggtggcactttacttactttaactggaaattacctaaacagtgggaattctagacacatttcaattggtggaaaaacatgtactctaaaaaggtgtggtaaatttattttttgttgcatctgtcaatttgaattaatatctgtaccttaaaaatt

SEQ ID NO: 206 - protein, 691 aa, Homo Sapiens [sequence omitted]

SEQ ID NO: 207 - DNA, 2294 bp, Homo Sapiens
  SR020G07
atgaaggcccccgctgtgcttgcacctggcatcctcgtgctcctgtttaccttggtgcagaggagcaatggggagtgtaaagaggcactagcaaagtccgagatgaatgtgaatatgaagtatcagcttcccaacttcaccgcggaaacacccatccagaatgtcattctacatgagcatcacattttccttggtgccactaactacatttatgttttaaatgaggaagaccttcagaaggttgctgagtacaagactgggcctgtgctggaacacccagattgtttcccatgtcaggactgcagcagcaaagccaatttatcaggaggtgtttggaaagataacatcaacatggctctagttgtcgacacctactatgatgatcaactcattagctgtggcagcgtcaacagagggacctgccagcgacatgtctttccccacaatcatactgctgacatacagtcggaggttcactgcatattctccccacagatagaagagcccagccagtgtcctgactgtgtggtgagcgccctgggagccaaagtcctttcatctgtaaaggaccggttcatcaacttctttgtaggcaataccataaattcttcttatttcccagatcatccattgcattcgatatcagtgagaaggctaaaggaaacgaaagatggttttatgtttttgacggaccagtcctacattgatgttttacctgagttcagagattcttaccccattaagtatgtccatgcctttgaaagcaacaattttatttacttcttgacggtccaaagggaaactctagatgctcagacttttcacacaagaataatcaggttctgttccataaactctggattgcattcctacatggaaatgcctctggagtgtattctcacagaaaagagaaaaaagagatccacaaagaaggaagtgtttaatatacttcaggctgcgtatgtcagcaagcctggggcccagcttgctagacaaataggagccagcctgaatgatgacattcttttcggggtgttcgcacaaagcaagccagattctgccgaaccaatggatcgatctgccatgtgtgcattccctatcaaatatgtcaacgacttcttcaacaagatcgtcaacaaaaacaatgtgagatgtctccagcatttttacggacccaatcatgagcactgctttaataggacacttctgagaaattcatcaggctgtgaagcgcgccgtgatgaatatcgaacagagtttaccacagctttgcagcgcgttgacttattcatgggtcaattcagcgaagtcctcttaacatctatatccaccttcattaaaggagacctcaccatagctaatcttgggacatcagagggtcgcttcatgcaggttgtggtttctcgatcaggaccatcaacccctcatgtgaattttctcctggactcccatccagtgtctccagaagtgattgtggagcatacattaaaccaaaatggctacacactggttatcactgggaagaagatcgcgaagatcccattgaatggcttgggttgcagacatttccagtcctgcagtcaatgcctctctgccccaccctttgttcagtgtggctggtgccacgacaaatgtgtgcgatcggaggaatgcctgagcgggacatggactcaacagatctgtctgcctgcaatctacaaggttttcccaaatagtgcaccccttgaaggagggacaaggctgaccatatgtggctgggactttggatttcggaggaataataaatttgatttaaagaaaactagagttctccttggaaatgagagctgcaccttgactttaagtgagagcacgatgaatacattgaaatgcacagttggtcctgccatgaataagcatttcaatatgtccataattatttcaaatggccacgggacaacacagtacagtacattctcctatgtgctcccctccaggatcctgtaataacaagtatttcgccgaaatacggtcctatggctggtggcactttacttactttaactggaaattacctaaacagtgggaattctagacacatttcaattggtggaaaaacatgtactttaaaaagtgtgtcaaacagtattcttgaatgttataccccagcccaaaccatttcaactgagtttgctgttaaattgaaaattgacttagccaaccgagagacaagcatcttcagttaccgtgaagatcccattgtctatgaaattcatccaaccaaatcttttattaggtaagtagaagcttctgat

SEQ ID NO: 208 - protein, 661 aa, Homo Sapiens [sequence omitted]

SEQ ID NO: 209 - DNA, 3256 bp, Homo Sapiens
  SR020H03
atgaaggcccccgctgtgcttgcacctggcatcctcgtgctcctgtttaccttggtgcagaggagcaatggggagtgtaaagaggcactagcaaagtccgagatgaatgtgaatatgaagtatcagcttcccaacttcaccgcggaaacacccatccagaatgtcattctacatgagcatcacattttccttggtgccactaactacatttatgttttaaatgaggaagaccttcagaaggttgctgagtacaagactgggcctgtgctggaacacccagattgtttcccatgtcaggactgcagcagcaaagccaatttatcaggaggtgtttggaaagataacatcaacatggctctagttgtcgacacctactatgatgatcaactcattagctgtggcagcgtcaacagagggacctgccagcgacatgtctttccccacaatcatactgctgacatacagtcggaggttcactgcatattctccccacagatagaagagcccagccagtgtcctgactgtgtggtgagcgccctgggagccaaagtcctttcatctgtaaaggaccggttcatcaacttctttgtaggcaataccataaattcttcttatttcccagatcatccattgcattcgatatcagtgagaaggctaaaggaaacgaaagatggttttatgtttttgacggaccagtcctacattgatgttttacctgagttcagagattcttaccccattaagtatgtccatgcctttgaaagcaacaattttatttacttcttgacggtccaaagggaaactctagatgctcagacttttcacacaagaataatcaggttctgttccataaactctggattgcattcctacatggaaatgcctctggagtgtattctcacagaaaagagaaaaaagagatccacaaagaaggaagtgtttaatatacttcaggctgcgtatgtcagcaagcctggggcccagcttgctagacaaataggagccagcctgaatgatgacattcttttcggggtgttcgcacaaagcaagccagattctgccgaaccaatggatcgatctgccatgtgtgcattccctatcaaatatgtcaacgacttcttcaacaagatcgtcaacaaaaacgatgtgagatgtctccagcatttttacggacccaatcatgagcactgctttaatgggacacttctgagaaattcatcaggctgtgaagcgcgccgtgatgaatatcgaacagagtttaccacagctttgcagcgcgttgacttattcatgggtcaattcagcgaagtcctcttaacatctatatccaccttcattaaaggagacctcaccatagctaatcttgggacatcagagggtcgcttcatgcaggttgtggtttctcgatcaggaccatcaacccctcgtgtgaattttctcctggactcccatccagtgtctccagaagtgattgtggagcatacattaaaccaaaatggctacacactggttatcactgggaagaagatcacgaagatcccattgaatggtttgggctgcagacatttccagtcctgcagtcaatgcctctctgccccaccctttgttcagtgtggctggtgctacgacaaatgtgtgcgatcggaggaatgcctgagcgggacatggactcaacagatctgtctgcctgcaatctacaaggttttcccaaatagtgcaccccttgaaggagggacaaggctgaccatatgtggctgggactttggatttcggaggaataataaatttgatttaaagaaaactagagttctccttggaaatgagagctgcaccttgactttaagtgagagcacgatgaatacatcgaaatgcacagttggtcctgccatgaataagcatttcaatatgtccataattatttcaaatggccacgggacaacacaatacagtacattctcctatgtggatcctgtaataacaagtatttcgccgaaatacggtcctatggctggtggcactttacttactttaactggaaattacctaaacagtgggaattctagacacatttcaattggtgggaaaacatgtactttaaaaagtgtgtcaaacagtattcttgaatgttataccccagcccaaaccatttcaactgagtttgctgttaaattgaaaattgacttagccaaccgagagacaagcatcttcagttaccgtgaagatcccattgtctatgtaattcatccaaccaaatcttttattaggtaagtagaagcttctgatgggtataagaaaacaatgaatacaaggatgattttgctgtagaatagtcaagaggaattgcagttttatctctggctttgatgctgttatgttgcttttgaaggcttctttccaattcaggagagaaaactatattcaggttctgagtgtagtttgacttatcaatgctagttcattccaagaagtatcttatcctgttctattacatttaaacagagtatagcaaaatagtttaatgtggcattgtagtatacatgcacttacattatgtacatatcaattctatactaaccttagtgcccagaagtggaattaccttttttcttccattctctagatatgtttttgtcctgcctgctttacacacagcttttctttatgccagactctctttgaattgatatctcattggacccagttcaatctgccttgttcccgttaattctatcagtctagcaacaatagttaagttcggttttctttgtatttttttcagaggtgaaatatttattttgtgtaattcggtgaataaaatacaaatgcatttcttaagcttatgaaatatgcattttaaaaatattttcaagttaaataagttgtttccaaagaacagttacccatgaacttccatttgatgttgactgtgcctctgacctgtaatcagtgcaggtgattaaattgaatccctctcttacagtacttggtggaaagaacctctcaacattgtcagttttctattttgctttgccagtggtgggagcacaataacaggtgttgggaaaaacctgaattcagttagtgtcccgagaatggtcataaatgtgcatgaagcaggaaggaactttacagtggtaagtcctttgagcaatggttctactcagagctctgcatctttgcctctaaccatgtggctttcatggtacctgagacatctcagtttcgcctttaaggtttgctagttaatttccttgca

SEQ ID NO: 210 - protein, 755 aa, Homo Sapiens [sequence omitted]

SEQ ID NO: 211 - DNA, 2481 bp, Homo Sapiens
  SR020H06
atgaaggcccccgctgtgcttgcacctggcatcctcgtgctcctgtttaccttggtgcagaggagcaatggggagtgtaaagaggcactagcaaagtccgagatgaatgtgaatacgaagtatcagcttcccaacttcaccgcggaaacacccatccagaatgtcattctacatgagcatcacattttccttggtgccactaactacatttatgttttaaatgaggaagaccttcagaaggttgctgagtacaagactgggcctgtgctggaacacccagattgtttcccatgtcaggactgcagcagcaaagccaatttatcaggaggtgtttggaaagataacatcaacatggctctagttgtcgacacctactatgatgatcaactcattagctgtggcagcgtcaacagagggacctgccagcgacatgtctttccccacaatcatactgctgacatacagtcggaggttcactgcatattctccccacagatagaagagcccagccagtgtcctgactgtgtggtgagcgccctgggagccaaagtcctttcatctgtaaaggaccggttcatcaacttctttgtaggcaataccataaattcttcttatttcccagatcatccattgcattcgatatcagtgagaaggctaaaggaaacgaaagatggttttatgtttttgacggaccagtcctacattgatgttttacctgagttcagagattcttaccccattaagtatgtccatgcctttgaaagcaacaattttatttacttcttgacggtccaaagggaaactctagatgctcagacttttcacacaagaataatcaggttctgttccataaactctggattgcattcctacatggaaatgcctctggagtgtattctcacagaaaagagaaaaaagagatccacaaagaaggaagtgtttaatatacttcaggctgcgtatgtcagcaagcctggggcccagcttgctagacaaataggagccagcctgaatgatgacattcttttcggggtgttcgcacaaagcaagccagattctgccgaaccaatggatcgatctgccatgtgtgcattccctatcaaatatgtcaacgacttcttcaacaagatcgtcaacaaaaacaatgtgagatgtctccagcatttttacggacccaatcatgagcactgctttaataggacacttctgagaaattcatcaggctgtgaagcgcgccgtgatgaatatcgaacagagtttaccacagctttgcagcgcgttgacttattcatgggtcaattcagcgaagtcctcttaacatctatatccaccttcattaaaggagacctcaccatagctaatcttgggacatcagagggtcgcttcatgcaggttgtggtttctcgatcaggaccatcaacccctcatgtgaattttctcctggactcccatccagtgtctccagaagtgattgtggagcatacattaaaccaaaatggctacacactggttatcactgggaagaagatcacgaagatcccattgaatggcttgggctgcagacatttccagtcctgcagtcaatgcctctctgccccaccctttgttcagtgtggctggtgccacgacaaatgtgtgcgatcggaggaatgcctgagcgggacatggactcaacagatctgtctgcctgcaatctacaaggttttcccaaatagtgcaccccttgaaggagggacaaggctgaccatatgtggctgggactttggatttcggaggaataataaatttgatttaaagaaaactagagttctccttggaaatgagagctgcaccttgactttaagtgagagcacgatgaatacattgaaatgcacagttggtcctgccatgaataagcatttcaatatgtccataattatttcaaatggccacgggacaacacaatacagtacattctcctatgtggatcctgtaataacaagtatttcgccgaaatacggtcctatggctggtggcactttacttactttaactggaaattacctaaacagtgggaattctagacacatttcaattggtggaaaaacatgtactttaaaaagtgtgtcaaacagtattcttgaatgttataccccagcccaaaccatttcaactgagtttgctgttaaattgaaaattgacttaaccaaccgagagacaagcatcttcagttaccgtgaagatcccattgtctatgaaattcatccaaccaaatcttttattagtggtgggagcacaataacaggtgttgggaaaaacctgaattcagttagtgtcccgagaatggtcataaatgtgcatgaagcaggaaggaactttacagtggtaagtcctttgagcaatggttctactcagagctctgcatctttgcctctaaccatgtggctttcatggtacctgagacatctcagtttcgcctttaaggtttgctagttaatttcc

SEQ ID NO: 212 - protein, 823 aa, Homo Sapiens [sequence omitted]

SEQ ID NO: 213 - DNA, 2667 bp, Homo Sapiens
  SR020H07
atgaaggcccccgctgtgcttgcacctggcatcctcgtgctcctgtttaccttggtgcagaggagcaatggggagtgtaaagaggcactagcaaagtccgagatgaatgtgaatatgaagtatcagcttcccaacttcaccgcggaaacacccatccagaatgtcattctacatgagcatcacattttccttggtgccactaactacatttatgttttaaatgaggaagaccttcagaaggttgctgagtacaagactgggcctgtgctggaacacccagattgtttcccatgtcaggactgcagcagcaaagccaatttatcaggaggtgtttggaaagataacatcaacatggctctagttgtcgacacctactatgatgatcaactcattagctgtggcagcgtcaacagagggacctgccagcgacatgtctttccccgcaatcatactgctgacatacagtcggaggttcactgcatattctccccacagatagaagagcccagccagtgtcctgactgtgtggtgagcgccctgggagccaaagtcctttcatctgtaaaggaccggttcaccaacttctttgtaggcaataccataaattcttcttatttcccagatcatccattgcattcgatatcagtgagaaggctaaaggaaacgaaagatggttttatgtttttgacggaccagtcctacattgatgttttacctgagttcagagattcttaccccattaagtatgtccatgcctttgaaagcaacaattttatttacttcttgacggtccaaagggaaactctagatgctcagacttttcacacaagaataatcaggttctgttccataaactctggattgcattcctacatggaaatgcctctggagtgtattctcacagaaaagagaaaaaagagatccacaaagaaggaagtgtttaatatacttcaggctgcgtatgtcagcaagcctggggcccagcttgctagacaaataggagccagcccgaatgatgacattcttttcggagtgttcgcacaaagcaagccagattctgccgaaccaatggatcgatctgccatgtgtgcattccctatcaaatatgtcaacgacttcttcaacaagatcgtcaacaaaaacaatgtgagatgtctccagcatttttacggacccaatcatgagcactgctttaataggacacttctgagaaattcatcaggctgtgaagcgcgccgtgatgaatatcgaacagagttcaccacagctttgcagcgcgttgacttattcatgggtcaattcagcgaagtcctcttaacatctatatccaccttcattaaaggagacctcaccatagctaatcttgggacatcagagggtcgcttcatgcaggttgtggtttctcgatcaggaccatcaacccctcatgtgaattttctcctggactcccatccagtgtctccagaagtgattgtggagcatacattaaaccaaaatggctacacactggttatcactgggaagaagatcacgaagatcccattgaatggcttgggctgcagacatttccagtcctgcagtcaatgcctctctgccccaccctttgttcagtgtggctggtgccacgacaaatgtgtgcgatcggaggaatgcctgagcgggacatggactcaacagatctgtctgcctgcaatctacaaggttttcccaaatagtgcaccccttgaaggagggacaaggctgaccatatgtggctgggactttggatttcggaggaataataaatttgatttaaagaaaactagagttctccttggaaatgagagctgcaccttgactttaagtgagagcacgatgaatacattgaaatgcacagttggtcctgccatgaataagcatttcaatatgtccataattatttcaaatggccacgggacaacacaatacagtacattctcctatgtggatcctgtaataacaagtatttcgccgaaatacggtcctatggctggtggcactttacttactttaactggaaattacctaaacagtgggaattctagacacatttcaattggtggaaaaacatgtactttaaaaagtgtgtcaaacagtattcttgaatgttataccccagcccaaaccatttcaactgagtttgctgttaaattgaaaattgacttagccaaccgagagacaagcatcttcagttaccgtgaagatcccattgtctatgaaattcatccaaccaaatcttttattagtggtgggagcacaataacaggtgttgggaaaaacctgaattcagttagtgtcccgagaatggtcataaatgtgcatgaagcgggaaggaactttacagtggcatgtcaacatcgctctaattcagagataatctgttgtaccactccttccctgcaacagctgaatctgcaactccccctgaaaaccaaagcctttttcatgttagatgggatcctttccaaatactttgatctcatttatgtacataatcctgtgtttaagccttttgaaaagccagtgatgatctcaatgggcaatgaaaatgtactggaaattaaggtaagaaatgctttaaacactgtcttaaatcatcagctcaaacttaattgacttcatagctatgtgaatacaattgttgtactt

SEQ ID NO: 214 - protein, 877 aa, Homo Sapiens [sequence omitted]

SEQ ID NO: 215 - DNA, 2542 bp, Homo Sapiens
  SR020H08
atgaaggcccccgctgtgcttgcacctggcatcctcgtgctcctgtttaccttggtgcagaggagcaatggggagtgtaaagaggcactagcaaagtccgagatgaatgtgaatatgaagtatcagcttcccaacttcaccgcggaaacacccatccagaatgtcattctacatgagcatcacattttccttggtgccactaactacatttatgttttaaatgaggaagaccttcagaaggttgctgagtacaagactgggcctgtgctggaacacccagattgtttcccatgtcaggactgcagcagcaaagccaatttatcaggaggtgtttggaaagataacatcaacatggctctagttgtcgacacctactatgatgatcaactcattagctgtggcagcgtcaacagagggacctgccagcgacatgtctttccccacaatcatactgctgacatacagtcggaggttcactgcatattctccccacagatagaagagcccagccagtgtcctgactgtgtggtgagcgccctgggagccaaagtcctttcatctgtaaaggaccggttcatcaacttctttgtaggcaataccataaattcttcttatttcccagatcatccattgcattcgatatcagtgagaaggctaaaggaaacgaaagatggttttatgtttttgacggaccagtcctacattgatgctttacctgagttcagagattcttaccccattaagtatgtccatgcctttgaaagcaacaattttatttacttcttgacggtccaaagggaaactctagatgctcagacttttcacacaagaataatcaggttctgttccataaactctggattgcattcctacatggaaatgcctctggagtgtattctcacagaaaagagaaaaaagagatccacaaagaaggaagtgtttaatatacttcaggctgcgtatgtcagcaagcctggggcccagcttgctagacaaataggagccagcctgaatgatgacattcttttcggggtgttcgcacaaagcaagccagattctgccgaaccaatggatcgatctgccatgtgtgcattccctatcaaatatgtcaacgacttcttcaacaagatcgtcaacaaaaacaatgtgagatgtctccagcatttttacggacccaatcatgagcactgctttaataggacacttctgagaaattcatcaggctgtgaagcgcgccgtgatgaatatcgaacagagtttaccacagctttgcagcgcgttgacttattcatgggtcaattcagcgaagtcctcttaacatctatatccaccttcattaaaggagacctcaccatagctaatcttgggacatcagagggtcgcttcatgcaggttgtggtttctcgatcaggaccatcaacccctcatgtgaattttctcctggactcccatccagtgtctccagaagtgattgtggagcatacattaaaccaaaatggctacacactggttatcactgggaggaagatcacgaagatcccattgaatggcttgggctgcagacatttccagtcctgcagtcaatgcctctctgccccaccctttgttcagtgtggctggtgccacgacaaatgtgtgcgatcggaggaatgcctgagcgggacatggactcagcagatctgtctgcctgcaatctacaaggttttcccaaatagtgcaccccttgaaggagggacaaggctgaccatatgtggctgggactttggatttcggaggaataataaatttgatttaaagaaaactagagttctccttggaaatgagagctgcaccttgactttaagtgagagcacgatgaatacattgaaatgcacagttggtcctgccatgaataagcatttcaatatgtccataattatttcaaatggccacgggacaacacaatacagtacattctcctatgtggatcctgtaataacaagtatttcgccgaaatacggtcctatggctggtggcactttacttactttaactggaaattacctaaacagtgggaattctagacacatttcaattggtggaaaaacgtgtactttaaaaagtgtgtcaaacagtattcttgaatgttataccccagcccaaaccatttcaactgagtctgctgttaaattgaaaattgacttagccaaccgagagacaagcatcttcagttaccgtgaagatcccattgtctatgaaattcatccaaccaaatcttttattaggcatgtcaacatcgctctaattcagagataatctgttgtaccactccttccctgcaacagctgaatctgcaactccccctgaaaaccaaagcctttttcatgttagatgggatcctttccaaatactttgatctcatttatgtacataatcctgtgtctaagccttttggaaagccagtgatgatctcaatgggcaatgaaaatgtactggaaattaagataagaaatgctttaaacactgtcttaaatcatcagctcaaacttaattgacttcatag

SEQ ID NO: 216 - protein, 764 aa, Homo Sapiens [sequence omitted]

SEQ ID NO: 217 - protein, 934 aa, Homo sapiens
  MET 34
MKAPAVLAPGILVLLFTLVQRSNGECKEALAKSEMNVNMKYQLPNFTAETPIQNVILHEHHIFLGATNYIYVLNEEDLQKVAEYKTGPVLEHPDCFPCQDCSSKANLSGGVWKDNINMALVVDTYYDDQLISCGSVNRGTCQRHVFPHNHTADIQSEVHCIFSPQIEEPSQCPDCVVSALGAKVLSSVKDRFINFFVGNTINSSYFPDHPLHSISVRRLKETKDGFMFLTDQSYIDVLPEFRDSYPIKYVHAFESNNFIYFLTVQRETLDAQTFHTRIIRFCSINSGLHSYMEMPLECILTEKRKKRSTKKEVFNILQAAYVSKPGAQLARQIGASLNDDILFGVFAQSKPDSAEPMDRSAMCAFPIKYVNDFFNKIVNKNNVRCLQHFYGPNHEHCFNRTLLRNSSGCEARRDEYRTEFTTALQRVDLFMGQFSEVLLTSISTFIKGDLTIANLGTSEGRFMQVVVSRSGPSTPHVNFLLDSHPVSPEVIVEHTLNQNGYTLVITGKKITKIPLNGLGCRHFQSCSQCLSAPPFVQCGWCHDKCVRSEECLSGTWTQQICLPAIYKVFPNSAPLEGGTRLTICGWDFGFRRNNKFDLKKTRVLLGNESCTLTLSESTMNTLKCTVGPAMNKHFNMSIIISNGHGTTQYSTFSYVDPVITSISPKYGPMAGGTLLTLTGNYLNSGNSRHISIGGKTCTLKSVSNSILECYTPAQTISTEFAVKLKIDLANRETSIFSYREDPIVYEIHPTKSFISGGSTITGVGKNLNSVSVPRMVINVHEAGRNFTVACQHRSNSEIICCTTPSLQQLNLQLPLKTKAFFMLDGILSKYFDLIYVHNPVFKPFEKPVMISMGNENVLEIKGNDIDPEAVKGEVLKVGNKSCENIHLHSEAVLCTVPNDLLKLNSELNIEVGFLHSSHDVNKEASVIMLFSGLK

SEQ ID NO: 218 - DNA, 1589 bp, Homo Sapiens
  CDS (29)...(1516): SR004C11
ggatcctctagggtcccagctcgcctcgatggagctcctcccgccgctgcctcagtccttcctgttgctgctgctgttgcctgccaagcccgcggcgggcgaggactggcagtgcccgcgcaccccctacgcggcctctcgcgactttgacgtgaagtacgtggtgcccagcttctccgccggaggcctggtacaggccatggtgacctacgagggcgacagaaatgagagtgctgtgtttgtagccatacgcaatcgcctgcatgtgcttgggcctgacctgaagtctgtccagagcctggccacgggccctgctggagaccctggctgccagacgtgtgcagcctgtggcccaggaccccacggccctcccggtgacacagacacaaaggtgctggtgctggatcccgcgctgcctgcgctggtcagttgtggctccagcctgcagggccgctgcttcctgcatgacctagagccccaagggacagccgtgcatctggcagcgccagcctgcctcttctcagcccaccataaccggcccgatgactgccccgactgtgtggccagcccattgggcacccgtgtaactgtggttgagcaaggccaggcctcctatttctacgtggcatcctcactggacgcagccgtggctgccagcttcagcccacgctcagtgtctatcaggcgtctcaaggctgacgcctcgggattcgcaccgggctttgtggcgttgtcagtgctgcccaagcatcttgtctcctacagtattgaatacgtgcacagcttccacacgggagccttcgtatacttcctgactgtacagccggccagcgtgacagatgatcctagtgccctgcacacacgcctggcacggcttagcgccactgagccagagttgggtgactatcgggagctggtcctcgactgcagatttgctccaaaacgcaggcgccggggggccccagaaggcggacagccctaccctgtgctgcgggtggcccactccgctccagtgggtgcccaacttgccactgagctgagcatcgccgagggccaggaagtactatttggggtctttgtgactggcaaggatggtggtcctggcgtgggccccaactctgtcgtctgtgccttccccattgacctgctggacacactaattgatgagggtgtggagcgctgttgtgaatccccagtccatccaggcctccggcgaggcctcgacttcttccagtcgcccagtttttgccccaacccgcctggcctggaagccctcagccccaacaccagctgccgccacttccctctgctggtcagtagcagcttctcacgtgtggacctattcaatgggctgttgggaccagtacaggtcactgcattgtatgtgacacgccttgacaacgtcacagtggcacacatgggcacaatggatgggcgtatcctgcaggtgggtcctcatccccacagtcccctagccctgggtccttgtctccatccccattttgctcacatctgacctgtcctaggtggagctggtcaggtcactaaactacttgctgtatgtgtccaacttctcactgggtgacagt

SEQ ID NO: 219 - protein, 495 aa, Homo Sapiens
  SR004C11
MELLPPLPQSFLLLLLLPAKPAAGEDWQCPRTPYAASRDFDVKYVVPSFSAGGLVQAMVTYEGDRNESAVFVAIRNRLHVLGPDLKSVQSLATGPAGDPGCQTCAACGPGPHGPPGDTDTKVLVLDPALPALVSCGSSLQGRCFLHDLEPQGTAVHLAAPACLFSAHHNRPDDCPDCVASPLGTRVTVVEQGQASYFYVASSLDAAVAASFSPRSVSIRRLKADASGFAPGFVALSVLPKHLVSYSIEYVHSFHTGAFVYFLTVQPASVTDDPSALHTRLARLSATEPELGDYRELVLDCRFAPKRRRRGAPEGGQPYPVLRVAHSAPVGAQLATELSIAEGQEVLFGVFVTGKDGGPGVGPNSVVCAFPIDLLDTLIDEGVERCCESPVHPGLRRGLDFFQSPSFCPNPPGLEALSPNTSCRHFPLLVSSSFSRVDLFNGLLGPVQVTALYVTRLDNVTVAHMGTMDGRILQVGPHPHSPLALGPCLHPHFAHI

SEQ ID NO: 220 - DNA, 3113 bp, Homo Sapiens
  SR014C01
ggtcccagctcgcctcgatggagctcctcccgccgctgcctcagtccttcctgttgctgctgctgttgcctgccaagcccgcggcgggcgaggactggcagtgcccgcgcaccccctacgcggcctctcgcgactttgacgtgaagtacgtggtgcccagcttctccgccggaggcctggtacaggccatggtgacctacgagggcgacagaaatgagagtgctgtgtttgtagccatacgcaatcgcctgcatgtgcttgggcctgacctgaagtctgtccagagcctggccacgggccctgctggagaccctggctgccagacgtgtgcagcctgtggcccaggaccccacggccctcccggtgacacagacacaaaggtgctggtgctggatcccgcgctgcctgcgctggtcagttgtggctccagcctgcagggccgctgcttcctgcatgacctagagccccaagggacagccgtgcatctggcagcgccagcctgcctcttctcagcccaccataaccggcccgatgactgccccgactgtgtggccagcccattgggcacccgtgtaactgtggttgagcaaggccaggcctcctatttctacgtggcatcctcactggacgcagccgtggctgccagcttcagcccacgctcagtgtctatcaggcgtctcaaggctgacgcctcgggattcgcaccgggctttgtggcgttgtcagtgctgcccaagcatcttgtctcctacagtattgaatacgtgcacagcttccacacgggagccttcgtatacttcctgactgtacagccggccagcgtgacagatgatcctagtgccctgcacacacgcctggcacggcttagcgccactgagccagagttgggtgactatcgggagctggtcctcgactgcagatttgctccaaaacgcaggcgccggggggccccagaaggcggacagccctaccctgtgctgcgggtggcccactccgctccagtgggtgcccaacttgccactgagctgagcatcgccgagggccaggaagtactatttggggtctttgtgactggcaaggatggtggtcctggcgtgggccccaactctgtcgtctgtgccttccccattgacctgctggacacactaattgatgagggtgtggagcgctgttgtgaatccccagtccatccaggcctccggcgaggcctcgacttcttccagtcgcccagtttttgccccaacccggttttccaggtacctatccaaggccctggctgccgccacttcctgacctgtgggcgttgcctaagggcatggcatttcatgggctgtggctggtgtgggaacatgtgcggccagcagaaggagtgtcctggctcctggcaacaggaccactgcccacctaagcttactgagttccacccccacagtggacctctaaggggcagtacaaggctgaccctgtgtggctccaacttctaccttcacccttctggtctggtgcctgagggaacccatcaggtcactgtgggccaaagtccctgccggccactgcccaaggacagctcaaaactcaggtacaatctggtccctcccctccctttccctgaagggggaaaccaagcagccccttccccatgagaccctgttctctgcttatcagaggcaaggggggatgggggaagctgcagtggttctgactgctttttgagagtcaaaaaggtctctgtccctttttgagctttcatgtgcccttcctgtctgttcactcatggaccagccaaggttaatctctgccccaccagaaccttccttccatggagggaggcatgggtggagaaatgccattctctggctcagaggagccctgtggcttgtggcaggcatgcatctaggcctgtgtaattcctggctgacctcaggggttcccctggtgccccagaccagtgccccggaaagactttgtagaggagtttgagtgtgaactggagcccttgggcacccaggcagtggggcctaccaacgtcagcctcaccgtgactaacatgccaccgggcaagcacttccgggtagacggcacctccgtgctgagaggcttctctttcatggagccagtgctgatagcagtgcaacccctctttggcccacgggcaggaggcacctgtctcactcttgaaggccagagtctgtctgtaggcaccagccgggctgtgctggtcaatgggactgagtgtctgctagcacgggtcagtgaggggcagcttttatgtgccacaccccctggggccacggtggccagtgtcccccttagcctgcaggtggggggtgcccaggtacctggttcctggaccttccagtacagagaagaccctgtcgtgctaagcatcagccccaactgtggctacatcaactcccacatcaccatctgtggccagcatctaacttcagcatggcacttagtgctgtcattccatgacgggcttagggcagtggaaagcaggtgtgagaggcagcttccagagcagcagctgtgccgccttcctgaatatgtggtccgagacccccagggatgggtggcagggaatctgagtgcccgaggggatggagctgctggctttacactgcctggctttcgcttcctacccccaccccatccacccagtgccaacctagttccactgaagcctgaggagcatgccattaagtttgaggtaagtgtaagggataggggcagggacagttggggatctgaaagtaggggccagcctactggctggtcctcatgaccctctctgcagtatattgggctgggcgctgtggctgactgtgtgggtatcaacgtgaccgtgggtggtgagagctgccagcacgagttccggggggacatggttgtctgccccctgcccccatccctgcagcttggccaggatggtgccccattgcaggtctgcgtagatggtgaatgtcatatcctgggtagagtggtgcggccagggccagatggggtcccacagagcacgctccttggtatcctgctgcctttgctgctgcttgtggctgcactggcgactgcactggtcttcagctactggtggcggaggaagcagctag

SEQ ID NO: 221 - protein, 541 aa, Homo Sapiens
  SR014C01
MELLPPLPQSFLLLLLLPAKPAAGEDWQCPRTPYAASRDFDVKYVVPSFSAGGLVQAMVTYEGDRNESAVFVAIRNRLHVLGPDLKSVQSLATGPAGDPGCQTCAACGPGPHGPPGDTDTKVLVLDPALPALVSCGSSLQGRCFLHDLEPQGTAVHLAAPACLFSAHHNRPDDCPDCVASPLGTRVTVVEQGQASYFYVASSLDAAVAASFSPRSVSIRRLKADASGFAPGFVALSVLPKHLVSYSIEYVHSFHTGAFVYFLTVQPASVTDDPSALHTRLARLSATEPELGDYRELVLDCRFAPKRRRRGAPEGGQPYPVLRVAHSAPVGAQLATELSIAEGQEVLFGVFVTGKDGGPGVGPNSVVCAFPIDLLDTLIDEGVERCCESPVHPGLRRGLDFFQSPSFCPNPVFQVPIQGPGCRHFLTCGRCLRAWHFMGCGWCGNMCGQQKECPGSWQQDHCPPKLTEFHPHSGPLRGSTRLTLCGSNFYLHPSGLVPEGTHQVTVGQSPCRPLPKDSSKLRYNLVPPLPFPEGGNQAAPSP

SEQ ID NO: 222 - DNA, 3069 bp, Homo Sapiens
  SR014C09
ggtcccagctcgcctcgatggagctcctcccgccgctgcctcagtccttcctgttgctgctgctgttgcctgccaagcccgcggcgggcgaggactggcagtgcccgcgcaccccctacgcggcctctcgcgactttgacgtgaagtacgtggtgcccagcttctccgccggaggcctggtacaggccatggtgacctacgagggcgacagaaatgagagtgctgtgtttgtagccatacgcaatcgcctgcatgtgcttgggcctgacctgaagtctgtccagagcctggccacgggccctgctggagaccctggctgccagacgtgtgcagcctgtggcccaggaccccacggccctcccggtgacacagacacaaaggtgctggtgctggatcccgcgctgcctgcgctggtcagttgtggctccagcctgcagggccgctgcttcctgcatgacctagagccccaagggacagccgtgcatctggcagcgccagcctgcctcttctcagcccaccataaccggcccgatgactgccccgactgtgtggccagcccattgggcacccgtgtaactgtggttgagcaaggccaggcctcctatttctacgtggcatcctcactggacgcagccgtggctgccagcttcagcccacgctcagtgtctatcaggcgtctcaaggctgacgcctcgggattcgcaccgggctttgtggcgttgtcagtgctgcccaagcatcttgtctcctacagtattgaatacgtgcacagcttccacacgggagccttcgtatacttcctgactgtacagccggccagcgtgacagatgatcctagtgccctgcacacacgcctggcacggcttagcgccactgagccagagttgggtgactatcgggagctggtcctcgactgcagatttgctccaaaacgcaggcgccggggggccccagaaggcggacagccctaccctgtgctgcgggtggcccactccgctccagtgggtgcccaacttgccactgagctgagcatcgccgagggccaggaagtactatttggggtctttgtgactggcaaggatggtggtcctggcgtgggccccaactctgtcgtctgtgccttccccattgacctgctggacacactaattgatgagggtgtggagcgctgttgtgaatccccagtccatccaggcctccggcgaggcctcgacttcttccagtcgcccagtttttgccccaacccgcctggcctggaagccctcagccccaacaccagctgccgccacttccctctgctggtcagtagcagcttctcacgtgtggacctattcaatgggctgttgggaccagtacaggtcactgcattgtatgtgacacgccttgacaacgtcacagtggcacacatgggcacaatggatgggcgtatcctgcaggtggagctggtcaggtcactaaactacttgctgtatgtgtccaacttctcactgggtgacagtgggcagcccgtgcagcgggatgtcagtcgtcttggggaccacctactctttgcctctggggaccaggttttccaggtacctatccaaggccctggctgccgccacttcctgacctgtgggcgttgcctaagggcatggcatttcatgggctgtggctggtgtgggaacatgtgcggccagcagaaggagtgtcctggctcctggcaacaggaccactgcccacctaagcttactgagttccacccccacagtggacctctaaggggcagtacaaggctgaccctgtgtggctccaacttctaccttcacccttctggtctggtgcctgagggaacccatcaggtcactgtgggccaaagtccctgccggccactgcccaaggacagctcaaaactcagaccagtgccccggaaagactttgtagaggagtttgagtgtgaactggagcccttgggcacccaggcagtggggcctaccaacgtcagcctcaccgtgactaacatgccaccgggcaagcacttccgggtagacggcacctccgtgctgagaggcttctctttcatggagccagtgctgatagcagtgcaacccctctttggcccacgggcaggaggcacctgtctcactcttgaaggccagagtctgtctgtaggcaccagccgggctgtgctggtcaatgggactgagtgtctgctagcacgggtcagtgaggggcagcttttatgtgccacaccccctggggccacggtggccagtgtcccccttagcctgcaggtggggggtgcccaggtacctggttcctggaccttccagtacagagaagaccctgtcgtgctaagcatcagccccaactgtggctacatcaactcccacatcaccatctgtggccagcatctaacttcagcatggcacttagtgctgtcattccatgacgggcttagggcagtggaaagcaggcagtgtgagaggcagcttccagagcagcagctgtgccgccttcctgaatatgtggtccgagacccccagggatgggtggcagggaatctgagtgcccgaggggatggagctgctggctttacactgcctggctttcgcttcctacccccaccccatccacccagtgccaacctagttccactgaagcctgaggagcatgccattaagtttgaggtaagtgtaagggataggggcagggacagttggggatctgaaagtaggggccagcctactggctggtcctcatgaccctctctgcagtatattgggctgggcgctgtggctgactgtgtgggtatcaacgtgaccgtgggtggtgagagctgccagcacgagttccggggggacatggttgtctgccccctgcccccatccctgcagcttggccaggatggtgccccattgcaggtctgcgtagatggtgaatgtcatatcctgggtagagtggtgcggccagggccagatggggtcccacagagcacgctccttggtatcctgctgcctttgctgctgcttgtggctgcactggcgactgcactggtcttcagctactggtggcggaggaagcagctag

SEQ ID NO: 223 - protein, 908 aa, Homo Sapiens
  SR014C09
MELLPPLPQSFLLLLLLPAKPAAGEDWQCPRTPYAASRDFDVKYVVPSFSAGGLVQAMVTYEGDRNESAVFVAIRNRLHVLGPDLKSVQSLATGPAGDPGCQTCAACGPGPHGPPGDTDTKVLVLDPALPALVSCGSSLQGRCFLHDLEPQGTAVHLAAPACLFSAHHNRPDDCPDCVASPLGTRVTVVEQGQASYFYVASSLDAAVAASFSPRSVSIRRLKADASGFAPGFVALSVLPKHLVSYSIEYVHSFHTGAFVYFLTVQPASVTDDPSALHTRLARLSATEPELGDYRELVLDCRFAPKRRRRGAPEGGQPYPVLRVAHSAPVGAQLATELSIAEGQEVLFGVFVTGKDGGPGVGPNSVVCAFPIDLLDTLIDEGVERCCESPVHPGLRRGLDFFQSPSFCPNPPGLEALSPNTSCRHFPLLVSSSFSRVDLFNGLLGPVQVTALYVTRLDNVTVAHMGTMDGRILQVELVRSLNYLLYVSNFSLGDSGQPVQRDVSRLGDHLLFASGDQVFQVPIQGPGCRHFLTCGRCLRAWHFMGCGWCGNMCGQQKECPGSWQQDHCPPKLTEFHPHSGPLRGSTRLTLCGSNFYLHPSGLVPEGTHQVTVGQSPCRPLPKDSSKLRPVPRKDFVEEFECELEPLGTQAVGPTNVSLTVTNMPPGKHFRVDGTSVLRGFSFMEPVLIAVQPLFGPRAGGTCLTLEGQSLSVGTSRAVLVNGTECLLARVSEGQLLCATPPGATVASVPLSLQVGGAQVPGSWTFQYREDPVVLSISPNCGYINSHITICGQHLTSAWHLVLSFHDGLRAVESRQCERQLPEQQLCRLPEYVVRDPQGWVAGNLSARGDGAAGFTLPGFRFLPPPHPPSANLVPLKPEEHAIKFEVSVRDRGRDSWGSESRGQPTGWSS

SEQ ID NO: 224 - DNA, 3500 bp, Homo Sapiens
  SR014E12
ggtcccagctcgcctcgatggagctcctcccgccgctgcctcagtccttcctgttgctgctgctgttgcctgccaagcccgcggcgggcgaggactggcagtgcccgcgcaccccctacgcggcctctcgcgactttgacgtgaagtacgtggtgcccagcttctccgccggaggcctggtacaggccatggtgacctacgagggcgacagaaatgagagtgctgtgtttgtagccatacgcaatcgcctgcatgtgcttgggcctgacctgaagtctgtccagagcctggccacgggccctgctggagaccctggctgccagacgtgtgcagcctgtggcccaggaccccacggccctcccggtgacacagacacaaaggtgctggtgctggatcccgcgctgcctgcgctggtcagttgtggctccagcctgcagggccgctgcttcctgcatgacctagagccccaagggacagccgtgcatctggcagcgccagcctgcctcttctcagcccaccataaccggcccgatgactgccccgactgtgtggccagcccattgggcacccgtgtaactgtggttgagcaaggccaggcctcctatttctacgtggcatcctcactggacgcagccgtggctgccagcttcagcccacgctcagtgtctatcaggcgtctcaaggctgacgcctcgggattcgcaccgggctttgtggcgttgtcagtgctgcccaagcatcttgtctcctacagtattgaatacgtgcacagcttccacacgggagccttcgtatacttcctgactgtacagccggccagcgtgacagatgatcctagtgccctgcacacacgcctggcacggcttagcgccactgagccagagttgggtgactatcgggagctggtcctcgactgcagatttgctccaaaacgcaggcgccggggggccccagaaggcggacagccctaccctgtgctgcgggtggcccactccgctccagtgggtgcccaacttgccactgagctgagcatcgccgagggccaggaagtactatttggggtctttgtgactggcaaggatggtggtcctggcgtgggccccaactctgtcgtctgtgccttccccattgacctgctggacacactaattgatgagggtgtggagcgctgttgtgaatccccagtccatccaggcctccggcgaggcctcgacttcttccagtcgcccagtttttgccccaacccgcctggcctggaagccctcagccccaacaccagctgccgccacttccctctgctggtcagtagcagcttctcacgtgtggacctattcaatgggctgttgggaccagtacaggtcactgcattgtatgtgacacgccttgacaacgtcacagtggcacacatgggcacaatggatgggcgtatcctgcaggtggagctggtcaggtcactaaactacttgctgtatgtgtccaacttctcactgggtgacagtgggcagcccgtgcagcgggatgtcagtcgtcttggggaccacctactctttgcctctggggaccaggttttccaggtacctatccaaggccctggctgccgccacttcctgacctgtgggcgttgcctaagggcatggcatttcatgggctgtggctggtgtgggaacatgtgcggccagcagaaggagtgtcctggctcctggcaacaggaccactgcccacctaagcttactgagttccacccccacagtggacctctaaggggcagtacaaggctgaccctgtgtggctccaacttctaccttcacccttctggtctggtgcctgagggaacccatcaggtcactgtgggccaaagtccctgccggccactgcccaaggacagctcaaaactcaggtacaatctggtccctcccctccctttccctgaagggggaaaccaagcagccccttccccatgagaccctgttctctgcttatcagaggcaaggggggatgggggaagctgcagtggttctgactgctttttgagagtcaaaaaggtctctgtccctttttgagctttcatgtgcccttcctgtctgttcactcatggaccagccaaggttaatctctgccccaccagaaccttccttccatggagggaggcatgggtggagaaatgccattctctggctcagaggagccctgtggcttgtggcaggcatgcatctaggcctgtgtaattcctggctgacctcaggggttcccctggtgccccagaccagtgccccggaaagactttgtagaggagtttgagtgtgaactggagcccttgggcacccaggcagtggggcctaccaacgtcagcctcaccgtgactaacatgccaccgggcaagcacttccgggtagacggcacctccgtgctgagaggcttctctttcatggagccagtgctgatagcagtgcaacccctctttggcccacgggcaggaggcacctgtctcactcttgaaggccagagtctgtctgtaggcaccagccgggctgtgctggtcaatgggactgagtgtctgctagcacgggtcagtgaggggcagcttttatgtgccacaccccctggggccacggtggccagtgtcccccttagcctgcaggtggggggtgcccaggtacctggttcctggaccttccagtacagagaagaccctgtcgtgctaagcatcagccccaactgtggctacatcaactcccacatcaccatctgtggccagcatctaacttcagcatggcacttagtgctgtcattccatgacgggcttagggcagtggaaagcaggtgtgagaggcagcttccagagcagcagctgtgccgccttcctgaatatgtggtccgagacccccagggatgggtggcagggaatctgagtgcccgaggggatggagctgctggctttacactgcctggctttcgcttcctacccccaccccatccacccagtgccaacctagttccactgaagcctgaggagcatgccattaagtttgaggtaagtgtaagggataggggcagggacagttggggatctgaaagtaggggccagcctactggctggtcctcatgaccctctctgcagtatattgggctgggcgctgtggctgactgtgtgggtatcaacgtgaccgtgggtggtgagagctgccagcacgagttccggggggacatggttgtctgccccctgcccccatccctgcagcttggccaggatggtgccccattgcaggtaggcagcccagctggacctccctgggaaacacgggcagagggcctacaggctgggcctgagttgccacctgcccccaggtctgcgtagatggtgaatgtcatatcctgggtagagtggtgcggccagggccagatggggtcccacagagcacgctccttggtatcctgctgcctttgctgctgcttgtggctgcactggcgactgcactggtcttcagctactggtggcggag

SEQ ID NO: 225 - protein, 647 aa, Homo Sapiens
  SR014E12
MELLPPLPQSFLLLLLLPAKPAAGEDWQCPRTPYAASRDFDVKYVVPSFSAGGLVQAMVTYEGDRNESAVFVAIRNRLHVLGPDLKSVQSLATGPAGDPGCQTCAACGPGPHGPPGDTDTKVLVLDPALPALVSCGSSLQGRCFLHDLEPQGTAVHLAAPACLFSAHHNRPDDCPDCVASPLGTRVTVVEQGQASYFYVASSLDAAVAASFSPRSVSIRRLKADASGFAPGFVALSVLPKHLVSYSIEYVHSFHTGAFVYFLTVQPASVTDDPSALHTRLARLSATEPELGDYRELVLDCRFAPKRRRRGAPEGGQPYPVLRVAHSAPVGAQLATELSIAEGQEVLFGVFVTGKDGGPGVGPNSVVCAFPIDLLDTLIDEGVERCCESPVHPGLRRGLDFFQSPSFCPNPPGLEALSPNTSCRHFPLLVSSSFSRVDLFNGLLGPVQVTALYVTRLDNVTVAHMGTMDGRILQVELVRSLNYLLYVSNFSLGDSGQPVQRDVSRLGDHLLFASGDQVFQVPIQGPGCRHFLTCGRCLRAWHFMGCGWCGNMCGQQKECPGSWQQDHCPPKLTEFHPHSGPLRGSTRLTLCGSNFYLHPSGLVPEGTHQVTVGQSPCRPLPKDSSKLRYNLVPPLPFPEGGNQAAPSP

SEQ ID NO: 226 - DNA, 1331 bp, Homo Sapiens
  CDS (24)...(944): SR005A06
cctgccacttccccaccgaggccatgggcccaggagttctgctgctcctgctggtggccacagcttggcatggtcagggaatcccagtgatagagcccagtgtccctgagctggtcgtgaagccaggagcaacggtgaccttgcgatgtgtgggcaatggcagcgtggaatgggatggccccccatcacctcactggaccctgtactctgatggctccagcagcatcctcagcaccaacaacgctaccttccaaaacacggggacctatcgctgcactgagcctggagaccccctgggaggcagcgccgccatccacctctatgtcaaagaccctgcccggccctggaacgtgctagcacaggaggtggtcgtgttcgaggaccaggacgcactactgccctgtctgctcacagacccggtgctggaagcaggcgtctcgctggtgcgtgtgcgtggccggcccctcatgcgccacaccaactactccttctcgccctggcatggcttcaccatccacagggccaagttcattcagagccaggactatcaatgcagtgccctgatgggtggcaggaaggtgatgtccatcagcatccggctgaaagtgcagaaagtcatcccagggcccccagccttgacactggtgcctgcagagctggtgcggattcgaggggaggctgcccagatcgtgtgctcagccagcagcgttgatgttaactttgatgtcttcctccaacacaacaacaccaagctcgcaatccctcaacaatctgactttcataataaccgttaccaaaaagtcctgaccctcaacctcgatcaagtagatttccaacatgccggcaactactcctgcgtggccagcaacgtgcagggcaagcactccacctccatgttcttccgggtggtaggcacaccttcaccctctctctgccccgcctgaagccctctgaggctggccgctactccttcctggccagaaacccaggaggctggagagctctgacgtttgagctcacccttcgataccccccagaggtaagcgtcatatggacattcatcaacggctctggcacccttttgtgtgctgcctctgggtacccccagcccaacgtgacatggctgcagtgcagtggccacactgataggtgtgatgaggcccaagtgctgcaggtctgggatgacccataccctgaggtcctgagccaggagcccttccacaaggtgacggtgcagagcctgctgactgttgagaccttagagcacaaccaaacctacgagtgcagggcccacaacagcgtggggagtggctcctgggccttcataccca

SEQ ID NO: 227 - protein, 306 aa, Homo Sapiens
  SR005A06
MGPGVLLLLLVATAWHGQGIPVIEPSVPELVVKPGATVTLRCVGNGSVEWDGPPSPHWTLYSDGSSSILSTNNATFQNTGTYRCTEPGDPLGGSAAIHLYVKDPARPWNVLAQEVVVFEDQDALLPCLLTDPVLEAGVSLVRVRGRPLMRHTNYSFSPWHGFTIHRAKFIQSQDYQCSALMGGRKVMSISIRLKVQKVIPGPPALTLVPAELVRIRGEAAQIVCSASSVDVNFDVFLQHNNTKLAIPQQSDFHNNRYQKVLTLNLDQVDFQHAGNYSCVASNVQGKHSTSMFFRVVGTPSPSLCPA

SEQ ID NO: 228 - DNA, 1582 bp, Homo sapiens
  SR002H01
gatcccatcgcagctaccgcgatgagaggcgctcgcggcgcctgggattttctctgcgttctgctcctactgcttcgcgtccagacaggctcttctcaaccatctgtgagtccaggggaaccgtctccaccatccatccatccaggaaaatcagacttaatagtccgcgtgggcgacgagattaggctgttatgcactgatccgggctttgtcaaatggacttttgagatcctggatgaaacgaatgagaataagcagaatgaatggatcacggaaaaggcagaagccaccaacaccggcaaatacacgtgcaccaacaaacacggcttaagcaattccatttatgtgtttgttagagatcctgccaagcttttccttgttgaccgctccttgtatgggaaagaagacaacgacacgctggtccgctgtcctctcacagacccagaagtgaccaattattccctcaaggggtgccaggggaagcctcttcccaaggacttgaggtttattcctgaccccaaggcgggcatcatgatcaaaagtgtgaaacgcgcctaccatcggctctgtctgcattgttctgtggaccaggagggcaagtcagtgctgtcggaaaaattcatcctgaaagtgaggccagccttcaaagctgtgcctgttgtgtctgtgtccaaagcaagctatcttcttagggaaggggaagaattcacagtgacgtgcacaataaaagatgtgtctagttctgtgtactcaacgtggaaaagagaaaacagtcagactaaactacaggagaaatataatagctggcatcacggtgacttcaattatgaacgtcaggcaacgttgactatcagttcagcgagagttaatgattctggagtgttcatgtgttatgccaataatacttttggatcagcaaatgtcacaacaaccttggaagtagtagataaaggattcattaatatcttccccatgataaacactacagtatttgtaaacgatggagaaaatgtagatttgattgttgaatatgaagcattccccaaacctgaacaccagcagtggatctatatgaacagaaccttcactgataaatgggaagattatcccaagtctgagaatgaaagtaatatcagatacgtaagtgaacttcatctaacgagattaaaaggcaccgaaggaggcacttacacattcctagtgtccaattctgacgtcaatgctgccatagcatttaatgtttatgtgaatacttccctgtaaatagagtgattcggcttttaatcggcaccacccttccacccccaaaaaggagaaaattcatcaaaaccagaaatcctgacttacgacaggctcgtgaatggcatgctccaatgtgtggcagcaggattcccagagcccacaatagattggtatttttgtccaggaactgagcagagatgctctgcttctgtactgccagtggatgtgcagacactaaactcatctgggccaccgtttggaaagctagtggttcagagttctatagattctagtgcattcaagcacaatggcacggttgaatgtaaggcttacaacgatg

SEQ ID NO: 229 - protein, 413 aa, Homo sapiens
  SR002H01
MRGARGAWDFLCVLLLLLRVQTGSSQPSVSPGEPSPPSIHPGKSDLIVRVGDEIRLLCTDPGFVKWTFEILDETNENKQNEWITEKAEATNTGKYTCTNKHGLSNSIYVFVRDPAKLFLVDRSLYGKEDNDTLVRCPLTDPEVTNYSLKGCQGKPLPKDLRFIPDPKAGIMIKSVKRAYHRLCLHCSVDQEGKSVLSEKFILKVRPAFKAVPVVSVSKASYLLREGEEFTVTCTIKDVSSSVYSTWKRENSQTKLQEKYNSWHHGDFNYERQATLTISSARVNDSGVFMCYANNTFGSANVTTTLEVVDKGFINIFPMINTTVFVNDGENVDLIVEYEAFPKPEHQQWIYMNRTFTDKWEDYPKSENESNIRYVSELHLTRLKGTEGGTYTFLVSNSDVNAAIAFNVYVNTSL

SEQ ID NO: 230 - protein, 217 aa, Homo sapiens
  PDGFRA.b BUILD 31
MGTSHPAFLVLGCLLTGLSLILCQLSLPSILPNENEKVVQLNSSFSLRCFGESEVSWQYPMSEEESSDVEIRNEENNSGLFVTVLEVSSASAAHTGLYTCYYNHTQTEENELEGRHIYIYVPDPDVAFVPLGMTDYLVIVEDDDSAIIPCRTTDPETPVTLHNSEGVVPASYDSRQGFNGTFTVGPYICEATVKGKKFQTIPFNVYALKGTCIISFL

SEQ ID NO: 231 - protein, 218 aa, Artificial Sequence
  PDGFRA.c BUILD 34
MGTSHPAFLVLGCLLTGLSLILCQLSLPSILPNENEKVVQLNSSFSLRCFGESEVSWQYPMSEEESSDVEIRNEENNSGLFVTVLEVSSASAAHTGLYTCYYNHTQTEENELEGRHIYIYVPDPDVAFVPLGMTDYLVIVEDDDSAIIPCRTTDPETPVTLHNSEGVVPASYDSRQGFNGTFTVGPYICEATVKGKKFQTIPFNVYALKGTCIISFLL

SEQ ID NO: 232 - DNA, 1508 bp, Homo Sapiens
  CDS (7)...(1017): SR007C09
gacaccatgcggcttccgggtgcgatgccagctctggccctcaaaggcgagctgctgttgctgtctctcctgttacttctggaaccacagatctctcagggcctggtcgtcacacccccggggccagagcttgtcctcaatgtctccagcaccttcgttctgacctgctcgggttcagctccggtggtgtgggaacggatgtcccaggagcccccacaggaaatggccaaggcccaggatggcaccttctccagcgtgctcacactgaccaacctcactgggctagacacgggagaatacttttgcacccacaatgactcccgtggactggagaccgatgagcggaaacggctctacatctttgtgccagatcccaccgtgggcttcctccctaatgatgccgaggaactattcatctttctcacggaaataactgagatcaccattccatgccgagtaacagacccacagctggtggtgacactgcacgagaagaaaggggacgttgcactgcctgtcccctatgatcaccaacgtggcttttctggtatctttgaggacagaagctacatctgcaaaaccaccattggggacagggaggtggattctgatgcctactatgtctacagactccaggtgtcatccatcaacgtctctgtgaacgcagtgcagactgtggtccgccagggtgagaacatcaccctcatgtgcattgtgatcgggaatgaggtggtcaacttcgagtggacatacccccgcaaagaaagtgggcggctggtggagccggtgactgacttcctcttggatatgccttaccacatccgctccatcctgcacatccccagtgccgagttagaagactcggggacctacacctgcaatgtgacggagagtgtgaatgaccatcaggatgaaaaggccatcaacatcaccgtgagagcggctacgtgcggctcctgggagaggtgggcacactacaatttgctgagctgcatcggagccggacactgcaggtagtgttcgaggcctacccaccgcccactgtcctgtggttcaaagacaaccgcaccctgggcgactccagcgctggcgaaatcgccctgtccacgcgcaacgtgtcggagacccggtatgtgtcagagctgacactggttcgcgtgaaggtggcagaggctggccactacaccatgcgggccttccatgaggatgctgaggtccagctctccttccagctacagatcaatgtccctgtccgagtgctggagctaagtgagagccaccctgacagtggggaacagacagtccgctgtcgtggccggggcatgccccagccgaacatcatctggtctgcctgcagagacctcaaaaggtgtccacgtgagctgccgcccacgctgctggggaacagttccgaagaggagagccagctggagactaacgtgacgtactgggaggaggagcaggagtttgaggtggtgagcacactgcgtctgcagcacgtggatcgg

SEQ ID NO: 233 - protein, 336 aa, Homo Sapiens
  SR007C09
MRLPGAMPALALKGELLLLSLLLLLEPQISQGLVVTPPGPELVLNVSSTFVLTCSGSAPVVWERMSQEPPQEMAKAQDGTFSSVLTLTNLTGLDTGEYFCTHNDSRGLETDERKRLYIFVPDPTVGFLPNDAEELFIFLTEITEITIPCRVTDPQLVVTLHEKKGDVALPVPYDHQRGFSGIFEDRSYICKTTIGDREVDSDAYYVYRLQVSSINVSVNAVQTVVRQGENITLMCIVIGNEVVNFEWTYPRKESGRLVEPVTDFLLDMPYHIRSILHIPSAELEDSGTYTCNVTESVNDHQDEKAINITVRAATCGSWERWAHYNLLSCIGAGHCR

SEQ ID NO: 234 - DNA, 928 bp, Homo sapiens
  SR021A05
caggaccctggaaggaagcaggatggcagccggaacagcagttggagcctgggtgctggtcctcagtctgtggggggcagtagtaggtgctcaaaacatcacagcccggattggcgagccactggtgctgaagtgtaagggggcccccaagaaaccaccccagcggctggaatggaaactgaacacaggccggacagaagcttggaaggtcctgtctccccagggaggaggcccctgggacagtgtggctcgtgtccttcccaacggctccctcttccttccggctgtcgggatccaggatgaggggattttccggtgccaggcaatgaacaggaatggaaaggagaccaagtccaactaccgagtccgtgtctaccgtaagaattccagggtcttctccaaggcctccctcttacctaagaaaaagccttcaaccccagccttggcccatgagggcctctgacttccaatctgaattcgtcgacaagcttctcgagcctaggctagctctagaccacacgtgtgggggcccgagctcgcggccgctgtattctatagtgtcacctaaatggccgcacaattcactggccgtcgttttacaacgtcgtgactgggaaaaccctggcgttacccaacttaatcgccttgcagcacatccccctttcgccagctggcgtaatagcgaagaggcccgcaccgatcgcccttcccaacagttgcgcagcctgaatggcgaatggaaattgtaagcgttaatattttgttaaaattcgcgttaaatttttgttaaatcagctcattttttaaccaataggccgaaatcggcaaaatcccttataaatcaaaagaatagaccgagatagggttgagtgttgttccagtttggaacaagagtccactattaaagaacgtggactccaacgtcaaa

SEQ ID NO: 235 - protein, 146 aa, Homo sapiens
  SR021A05
MAAGTAVGAWVLVLSLWGAVVGAQNITARIGEPLVLKCKGAPKKPPQRLEWKLNTGRTEAWKVLSPQGGGPWDSVARVLPNGSLFLPAVGIQDEGIFRCQAMNRNGKETKSNYRVRVYRKNSRVFSKASLLPKKKPSTPALAHEGL

SEQ ID NO: 236 - DNA, 994 bp, Homo sapiens
  SR021C02
aggaccctggaaggaagcaggatggcagccggaacagcagttggagcctgggtgctggtcctcagtctgtggggggcagtagtaggtgctcaaaacatcacagcccggattggcgagccactggtgctgaagtgtaagggggcccccaagaaaccaccccagcggctggaatggaaactgaacacaggccggacagaagcttggaaggtcctgtctccccagggaggaggcccctgggacagtgtggctcgtgtccttcccaacggctccctcttccttccggctgtcgggatccaggatgaggggattttccggtgccaggcaatgaacaggaatggaaaggagaccaagtccaactaccgagtccgtgtctaccagattcctgggaagccagaaattgtagattctgcctctgaactcacggctggtgttcccaataaggtagtggaagaaagcaggagaagtagaaaacggccctgtgaacaggaggtggggacatgtgtgtcagagggaagctaccctgcagggactcttagctggcacttggatgggaagcccctggtgcctaatgagaagggagtatctgtgaaggaacagaccaggagacaccctgagacagggctcttcacactgcagtcggagctaatggtgaccccagcccggggaggagatccccgtcccaccttctcctgtagcttcagcccaggccttccccgacaccgggccttgcgcacagcccccatccagccccgtgtctggggtgagcataggtggggagggccccaagctcacgtgagcacgttctggaagtctgacccttagggaaagagggagtaatcacgaattctggatccgatacgtaacgcgtctgcagcatgcgtggtaccgagctttccctatagtgagtcgtattagagcttggccgtaatcatggtcatagctgtttcctgtgtgaaattgttatccgctcacaatttcacacacatacgagccg

SEQ ID NO: 237 - protein, 266 aa, Homo sapiens
  SR021C02
MAAGTAVGAWVLVLSLWGAVVGAQNITARIGEPLVLKCKGAPKKPPQRLEWKLNTGRTEAWKVLSPQGGGPWDSVARVLPNGSLFLPAVGIQDEGIFRCQAMNRNGKETKSNYRVRVYQIPGKPEIVDSASELTAGVPNKVVEESRRSRKRPCEQEVGTCVSEGSYPAGTLSWHLDGKPLVPNEKGVSVKEQTRRHPETGLFTLQSELMVTPARGGDPRPTFSCSFSPGLPRHRALRTAPIQPRVWGEHRWGGPQAHVSTFWKSDP

SEQ ID NO: 238 - DNA, 1165 bp, Homo sapiens
  SR021C06
atggcagccggaacagcagttggagcctgggtgctggtcctcagtctgtggggggcagtagtaggtgctcaaaacatcacagcccggattggcgagccactggtgctgaagtgtaagggggcccccaagaaaccaccccagcggctggaatggaaactgaacacaggccggacagaagcttggaaggtcctgtctccccagggaggaggcccctgggacagtgtggctcgtgtccttcccaacggctccctcttccttccggctgtcgggatccaggatgaggggattttccggtgccaggcaatgaacaggaatggaaaggagaccaagtccaactaccgagtccgtgtctaccagattcctgggaagccagaaattgtagattctgcctctgaactcacggctggtgttcccaataaggtggggacatgtgtgtcggagggaagctaccctgcagggactcttagctggcacttggatgggaagcccctggtgcctaatgagaagggagtatctgtgaaggaacagaccaggagacaccctgagacagggctcttcacactgcagtcggagctaatggtgaccccagcccggggaggagatccccgtcccaccttctcctgtagcttcagcccaggccttccccgacaccgggccttgcgcacagcccccatccagccccgtgtctgggagcctgtgcctctggaggaggtccaattggtggtggagccagaaggtggagcagtagctcctggtggaaccgtaaccctgacctgtgaagtccctgcccagccctctcctcaaatccactggatgaaggatggggtgcccttgccccttccccccagccctgtgctgatcctccctgagatagggcctcaggaccagggaacctacagctgtgtggccacccattccagccacgggccccaggaaagccgtgctgtcagcatcagcatcatcggtgagacctctccccaagccctacagaccctgggactagggtgcaggacagcacaggctctaatttcctgccccattctggccttatccctaacagccaccccacctctccctccatgcacccacacccaagcctcccctgccccacccaaattctgccaagagagcagccaagcctctcccttcttccctctgagctaaa

SEQ ID NO: 239 - protein, 387 aa, Homo sapiens
  SR021C06
MAAGTAVGAWVLVLSLWGAVVGAQNITARIGEPLVLKCKGAPKKPPQRLEWKLNTGRTEAWKVLSPQGGGPWDSVARVLPNGSLFLPAVGIQDEGIFRCQAMNRNGKETKSNYRVRVYQIPGKPEIVDSASELTAGVPNKVGTCVSEGSYPAGTLSWHLDGKPLVPNEKGVSVKEQTRRHPETGLFTLQSELMVTPARGGDPRPTFSCSFSPGLPRHRALRTAPIQPRVWEPVPLEEVQLVVEPEGGAVAPGGTVTLTCEVPAQPSPQIHWMKDGVPLPLPPSPVLILPEIGPQDQGTYSCVATHSSHGPQESRAVSISIIGETSPQALQTLGLGCRTAQALISCPILALSLTATPPLPPCTHTQASPAPPKFCQESSQASPFFPLS

SEQ ID NO: 240 - DNA, 1415 bp, Homo sapiens
  SR021C08
atggcagccggaacagcagttggagcctgggtgctggtcctcagtctgtggggggcagtagtaggtgctcaaaacatcacagcccggattggcgagccactggtgctgaagtgtaagggggcccccaagaaaccaccccagcggctggaatggaaactgaacacaggccggacagaagcttggaaggtcctgtctccccagggaggaggcccctgggacagtgtggctcgtgtccttcccaacggctccctcttccttccggctgtcgggatccaggatgaggggattttccggtgccaggcaatgaacaggaatggaaaggagaccaagtccaactaccgagtccgtgtctaccagattcctgggaagccagaaattgtagattctgcctctgaactcacggctggtgttcccaataaggtagtggaagaaagcaggagaagtagaaaacggccctgtgaacaggaggcgagtgtgtgtgggtgtgggtgtgtggcatctctcattttcaaaggattctgaggtcaccactctttccccaggtggggacatgtgtgtcagagggaagctaccctgcagggactcttagctggcacttggatgggaagcccctggtgcctaatgagaagggagtatctgtgaaggaacagaccaggagacaccctgagacagggctcttcacactgcagtcggagctaatggtgaccccagcccggggaggagatccccgtcccaccttctcctgtagcttcagcccaggccttccccgacaccgggccttgcgcacagcccccatccagccccgtgtctggggtgagcataggtggggagggccccaagctcacgtgagcacgttctggaagtctgacccttagggaaagagggagtcaagcccatggccactgggatcactcacaagtgtaactctccacctcaaaacccttccaactcccagagcctgtgcctctggaggaggtccaattggtggtggagccagaaggtggagcagtagctcctggtggaaccgtaaccctgacctgtgaagtccctgcccagccctctcctcaaatccactggatgaaggatggtgtgcccttgccccttccccccagccctgtgctgatcctccctgagatagggcctcaggaccagggaacctacagctgtgtggccacccattccagccacgggccccaggaaagccgtgctgtcagcatcagcatcatcgaaccaggcaaggaggggccaactgcaggtgaggggtttgataaagtcagggaagcagaagatagcccccaacacatgtgactggggggatggtcaacaagaaaggaatggaaggccccagaaaaccaggaggaagaggaggagcgtgcagaactgaatcagtcggaggaacctgaggcaggcgagaa

SEQ ID NO: 241 - protein, 173 aa, Homo sapiens [sequence omitted]

SEQ ID NO: 242 - DNA, 941 bp, Homo sapiens
  SR021F06
aggaccctggaaggaagcaggatggcagccggaacagcagttggagcctgggtgctggtcctcagtctgtggggggcagtagtaggtgctcaaaacatcacagcccggattggcgagccactggtgctgaagtgtaagggggcccccaagaaaccaccccagcggctggaatggaaactgaacacaggccggacagaagcttggaaggtcctgtctccccagggaggaggcccctgggacagtgtggctcgtgtccttcccaacggctccctcttccttccggctgtcgggatccaggatgaggggattttccggtgccaggcaatgaacaggaatggaaaggagaccaagtccaactaccgagtccgtgtctaccagattcctgggaagccagaaattgtagattctgcctctgaactcacggctggtgttcccaataaggtggggacatgtgtgtcagagggaagctaccctgcagggactcttagctggcacttggatgggaagcccctggtgcctaatgagaagggtgagtcctaaggtgccccccaagaatcacgaattctggatccgatacgtaacgcgtctgcagcatgcgtggtaccgagctttccctatagtgagtcgtattagagcttggcgtaatcatggtcatagctgtttcctgtgtgaaattgttatccgctcacaattccacacaacatacgagccggaagcataaagtgtaaagcctggggtgcctaatgagtgagctaactcacattaattgcgttgcgctcactgcccgctttccagtcgggaaacctgtcgtgccagctgcattaatgaatcggccaacgcgcggggagaggcggtttgcgtattgggcgctcttccgcttcctcgctcactgactcgctgcgctcggtcgttcggctgcggcgagcggtatcagctcactc

SEQ ID NO: 243 - protein, 172 aa, Homo sapiens [sequence omitted]

SEQ ID NO: 244 - DNA, 1505 bp, Homo Sapiens
  CDS (41)...(1144): SR007G02
tgcacatttgtggaaactggatggagagatttggggaagcatggactctttagccagcttagttctctgtggagtcagcttgctcctttctggaactgtggaaggtgccatggacttgatcttgatcaattccctacctcttgtatctgatgctgaaacatctctcacctgcattgcctctgggtggcgcccccatgagcccatcaccataggaagggactttgaagccttaatgaaccagcaccaggatccgctggaagttactcaagatgtgaccagagaatgggctaaaaaagttgtttggaagagagaaaaggctagtaagatcaatggtgcttatttctgtgaagggcgagttcgaggagaggcaatcaggatacgaaccatgaagatgcgtcaacaagcttccttcctaccagctactttaactatgactgtggacaagggagataacgtgaacatatctttcaaaaaggtattgattaaagaagaagatgcagtgatttacaaaaatggttccttcatccattcagtgccccggcatgaagtacctgatattctagaagtacacctgcctcatgctcagccccaggatgctggagtgtactcggccaggtatataggaggaaacctcttcacctcggccttcaccaggctgatagtccggagatgtgaagcccagaagtggggacctgaatgcaaccatctctgtactgcttgtatgaacaatggtgtctgccatgaagatactggagaatgcatttgccctcctgggtttatgggaaggacgtgtgagaaggcttgtgaactgcacacgtttggcagaacttgtaaagaaaggtgcagtggacaagagggatgcaagtcttatgtgttctgtctccctgacccctatgggtgttcctgtgccacaggctggaagggtctgcagtgcaatgaagcatgccaccctggtttttacgggccagattgtaagcttaggtgcagctgcaacaatggggagatgtgtgatcgcttccaaggatgtctctgctctccaggatggcaggggctccagtgtgagagagaaggtaaagcaaggcatacagaggatgaccccaaagatagtggatttgccagatcatatagaagtaaacagtggtaaatttaatcccatttgcaaagcttctggctggccgctacctactaatgaagaaatgaccctggtgaagccggatgggacagtgctccattagccatattcaccatccaccggatcctcccccctgactcaggagtttgggtctgcagtgtgaacacagtggctgggatggtggaaaagcccttcaacatttctgttaaagttcttccaaagcccctgaatgccccaaacgtgattgacactggacataactttgctgtcatcaacatcagctctgagccttactttggggatggaccaatcaaatccaagaagcttctatacaaacccgttaatcactatgaggcttggcaacatattcaag

SEQ ID NO: 245 - protein, 367 aa, Homo Sapiens
  SR007G02
MDSLASLVLCGVSLLLSGTVEGAMDLILINSLPLVSDAETSLTCIASGWRPHEPITIGRDFEALMNQHQDPLEVTQDVTREWAKKVVWKREKASKINGAYFCEGRVRGEAIRIRTMKMRQQASFLPATLTMTVDKGDNVNISFKKVLIKEEDAVIYKNGSFIHSVPRHEVPDILEVHLPHAQPQDAGVYSARYIGGNLFTSAFTRLIVRRCEAQKWGPECNHLCTACMNNGVCHEDTGECICPPGFMGRTCEKACELHTFGRTCKERCSGQEGCKSYVFCLPDPYGCSCATGWKGLQCNEACHPGFYGPDCKLRCSCNNGEMCDRFQGCLCSPGWQGLQCEREGKARHTEDDPKDSGFARSYRSKQW

SEQ ID NO: 246 - DNA, 1467 bp, Homo Sapiens
  CDS (41)...(1447): SR007H03
tgcacatttgtggaaactggatggagagatttggggaagcatggactctttagccagcttagttctctgtggagtcagcttgctcctttctggaactgtggaaggtgccatggacttgatcttgatcaattccctacctcttgtatctgatgctgaaacatctctcacctgcattgcctctgggtggcgcccccatgagcccatcaccataggaagggactttgaagccttaatgaaccagcaccaggatccgctggaagttactcaagatgtgaccagagaatgggctaaaaaagttgtttggaagagagaaaaggctagtaagatcaatggtgcttatttctgtgaagggcgagttcgaggagaggcaatcaggatacgaaccatgaagatgcgtcaacaagcttccttcctaccagctactttaactatgactgtggacaagggagataacgtgaacatatctttcaaaaaggtattgattaaagaagaagatgcagtgatttacaaaaatggttccttcatccattcagtgccccggcatgaagtacctgatattctagaagtacacctgcctcatgctcagccccaggatgctggagtgtactcggccaggtatataggaggaaacctcttcacctcggccttcaccaggctgatagtccggagatgtgaagcccagaagtggggacctgaatgcaaccatctctgtactgcttgtatgaacaatggtgtctgccatgaagatactggagaatgcatttgccctcctgggtttatgggaaggacgtgtgagaaggcttgtgaactgcacacgtttggcagaacttgtaaagaaaggtgcagtggacaagagggatgcaagtcttatgtgttctgtctccctgacccctatgggtgttcctgtgccacaggctggaagggtctgcagtgcaatgaaggcatacagaggatgaccccaaagatagtggatttgccagatcatatagaagtaaacagtggtaaatttaatcccatttgcaaagcttctggctggccgctacctactaatgaagaaatgaccctggtgaagccggatgggacagtgctccatccaaaagactttaaccatacggatcatttctcagtagccatattcaccatccaccggatcctcccccctgactcaggagtttgggtctgcagtgtgaacacagtggctgggatggtggaaaagcccttcaacatttctgttaaagttcttccaaagcccctgaatgccccaaacgtgattgacactggacataactttgctgtcatcaacatcagctctgagccttactttggggatggaccaatcaaatccaagaagcttctatacaaacccgttaatcactatgaggcttggcaacatattcaagtatccatggagaaacagaggctgactaaagcaaatagtgacaaatgagattgttacactcaactatt

SEQ ID NO: 247 - protein, 468 aa, Homo Sapiens
  SR007H03
MDSLASLVLCGVSLLLSGTVEGAMDLILINSLPLVSDAETSLTCIASGWRPHEPITIGRDFEALMNQHQDPLEVTQDVTREWAKKVVWKREKASKINGAYFCEGRVRGEAIRIRTMKMRQQASFLPATLTMTVDKGDNVNISFKKVLIKEEDAVIYKNGSFIHSVPRHEVPDILEVHLPHAQPQDAGVYSARYIGGNLFTSAFTRLIVRRCEAQKWGPECNHLCTACMNNGVCHEDTGECICPPGFMGRTCEKACELHTFGRTCKERCSGQEGCKSYVFCLPDPYGCSCATGWKGLQCNEGIQRMTPKIVDLPDHIEVNSGKFNPICKASGWPLPTNEEMTLVKPDGTVLHPKDFNHTDHFSVAIFTIHRILPPDSGVWVCSVNTVAGMVEKPFNISVKVLPKPLNAPNVIDTGHNFAVINISSEPYFGDGPIKSKKLLYKPVNHYEAWQHIQVSMEKQRLTKANSDK

SEQ ID NO: 248 - protein, 864 aa, Homo sapiens
  TEKc
MDSLASLVLCGVSLLLSGTVEGAMDLILINSLPLVSDAETSLTCIASGWRPHEPITIGRDFEALMNQHQDPLEVTQDVTREWAKKVVWKREKASKINGAYFCEGRVRGEAIRIRTMKMRQQASFLPATLTMTVDKGDNVNISFKKVLIKEEDAVIYKNGSFIHSVPRHEVPDILEVHLPHAQPQDAGVYSARYIGGNLFTSAFTRLIVRRCEAQKWGPECNHLCTACMNNGVCHEDTGECICPPGFMGRTCEKACELHTFGRTCKERCSGQEGCKSYVFCLPDPYGCSCATGWKGLQCNEACHPGFYGPDCKLRCSCNNGEMCDRFQGCLCSPGWQGLQCEREGIQRMTPKIVDLPDHIEVNSGKFNPICKASGWPLPTNEEMTLVKPDGTVLHPKDFNHTDHFSVAIFTIHRILPPDSGVWVCSVNTVAGMVEKPFNISVKVLPKPLNAPNVIDTGHNFAVINISSEPYFGDGPIKSKKLLYKPVNHYEAWQHIQVTNEIVTLNYLEPRTEYELCVQLVRRGEGGEGHPGPVRRFTTASIGLPPPRGLNLLPKSQTTLNLTWQPSSEDDFYVEVERRSVQKSDQQNIKVPGNLTSVLLNNLHPREQYVVRARVNTKAQGEWSEDLTAWTLSDILPPQPENIKISNITHSSAVISWTILDGYSISSITIRYKVQGKNEDQHVDVKIKNATITQYQLKGLEPETAYQVDIFAENNIGSSNPAFSHELVTLPESQAPADLGGGKMLLIAILGSAGMTCLTVLLAFLIILQLKRANVQRRMAQAFQNVREEPAVQFNSGTLALNRKVKNNPDPTIYPVLDWNDIKFQDVIGEGNFGQVLKARIKKDGLRMDAAIKRMKEYASKDDHR

SEQ ID NO: 249 - protein, 798 aa, Homo sapiens
  TEKc 31
MDLILINSLPLVSDAETSLTCIASGWRPHEPITIGRDFEALMNQHQDPLEVTQDVTREWAKKVVWKREKASKINGAYFCEGRVRGEAIRIRTMKMRQQASFLPATLTMTVDKGDNVNISFKKVLIKEEDAVIYKNGSFIHSVPRHEVPDILEVHLPHAQPQDAGVYSARYIGGNLFTSAFTRLIVRRCEAQKWGPECNHLCTACMNNGVCHEDTGECICPPGFMGRTCEKACELHTFGRTCKERCSGQEGCKSYVFCLPDPYGCSCATGWKGLQCNEGIQRMTPKIVDLPDHIEVNSGKFNPICKASGWPLPTNEEMTLVKPDGTVLHPKDFNHTDHFSVAIFTIHRILPPDSGVWVCSVNTVAGMVEKPFNISVKVLPKPLNAPNVIDTGHNFAVINISSEPYFGDGPIKSKKLLYKPVNHYEAWQHIQVTNEIVTLNYLEPRTEYELCVQLVRRGEGGEGHPGPVRRFTTASIGLPPPRGLNLLPKSQTTLNLTWQPSSEDDFYVEVERRSVQKSDQQNIKVPGNLTSVLLNNLHPREQYVVRARVNTKAQGEWSEDLTAWTLSDILPPQPENIKISNITHSSAVISWTILDGYSISSITIRYKVQGKNEDQHVDVKIKNATITQYQLKGLEPETAYQVDIFAENNIGSSNPAFSHELVTLPESQAPADLGGGKMLLIAILGSAGMTCLTVLLAFLIILQLKRANVQRRMAQAFQNVREEPAVQFNSGTLALNRKVKNNPDPTIYPVLDWNDIKFQDVIGEGNFGQVLKARIKKDGLRMDAAIKRMKEYASKDDHR

SEQ ID NO: 250 - protein, 821 aa, Homo sapiens
  TEKc 34
MDSLASLVLCGVSLLLSGTVEGAMDLILINSLPLVSDAETSLTCIASGWRPHEPITIGRDFEALMNQHQDPLEVTQDVTREWAKKVVWKREKASKINGAYFCEGRVRGEAIRIRTMKMRQQASFLPATLTMTVDKGDNVNISFKKVLIKEEDAVIYKNGSFIHSVPRHEVPDILEVHLPHAQPQDAGVYSARYIGGNLFTSAFTRLIVRRCEAQKWGPECNHLCTACMNNGVCHEDTGECICPPGFMGRTCEKACELHTFGRTCKERCSGQEGCKSYVFCLPDPYGCSCATGWKGLQCNEGIQRMTPKIVDLPDHIEVNSGKFNPICKASGWPLPTNEEMTLVKPDGTVLHPKDFNHTDHFSVAIFTIHRILPPDSGVWVCSVNTVAGMVEKPFNISVKVLPKPLNAPNVIDTGHNFAVINISSEPYFGDGPIKSKKLLYKPVNHYEAWQHIQVTNEIVTLNYLEPRTEYELCVQLVRRGEGGEGHPGPVRRFTTASIGLPPPRGLNLLPKSQTTLNLTWQPSSEDDFYVEVERRSVQKSDQQNIKVPGNLTSVLLNNLHPREQYVVRARVNTKAQGEWSEDLTAWTLSDILPPQPENIKISNITHSSAVISWTILDGYSISSITIRYKVQGKNEDQHVDVKIKNATITQYQLKGLEPETAYQVDIFAENNIGSSNPAFSHELVTLPESQAPADLGGGKMLLIAILGSAGMTCLTVLLAFLIILQLKRANVQRRMAQAFQNVREEPAVQFNSGTLALNRKVKNNPDPTIYPVLDWNDIKFQDVIGEGNFGQVLKARIKKDGLRMDAAIKRMKEYASKDDHR

SEQ ID NO: 251 - protein, 786 aa, Homo sapiens
  TIE isoform
MVWRVPPFLLPILFLASHVGAAVDLTLLANLRLTDPQRFFLTCVSGEAGAGRGSDAWGPPLLLEKDDRIVRTPPGPPLRLARNGSHQVTLRGFSKPSDLVGVFSCVGGAGARRTRVIYVHNSPGAHLLPDKVTHTVNKGDTAVLSARVHKEKQTDVIWKSNGSYFYTLDWHEAQDGRFLLQLPNVQPPSSGIYSATYLEASPLGSAFFRLIVRGCGAGRWGPGCTKECPGCLHGGVCHDHDGECVCPPGFTGTRCEQACREGRFGQSCQEQCPGISGCRGLTFCLPDPYGCSCGSGWRGSQCQEACAPGHFGADCRLQCQCQNGGTCDRFSGCVCPSGWHGVHCEKSDRIPQILNMASELEFNLETMPRINCAAAGNPFPVRGSIELRKPDGTVLLSTKAIVEPEKTTAEFEVPRLVLADSGFWECRVSTSGGQDSRRFKVNVKVPPVPLAAPRLLTKQSRQLVVSPLVSFSGDGPISTVRLHYRPQDSTMDWSTIVVDPSENVTLMNLRPKTGYSVRVQLSRPGEGGEGAWGPPTLMTTDCPEPLLQPWLEGWHVEGTDRLRVSWSLPLVPGPLVGDGFLLRLWDGTRGQERRENVSSPQARTALLTGLTPGTHYQLDVQLYHCTLLGPASPPAHVLLPPSGPPAPRHLHAQALSDSEIQLTWKHPEALPGPISKYVVEVQVAGGAGDPLWIDVDRPEETSTIIRGLNASTRYLFRMRASIQGLGDWSNTVEESTLGNGLQAEGPVQESRAAEEGLDQQLILAVVGSVSATCLTILAALLTLVCI

SEQ ID NO: 252 - DNA, 934 bp, Homo Sapiens
  CDS (17)...(772): SR006A04
ggtcggcctctggagtatggtctggcgggtgccccctttcttgctccccatcctcttcttggcttctcatgtgggcgcggcggtggacctgacgctgctggccaacctgcggctcacggacccccagcgcttcttcctgacttgcgtgtctggggaggccggggcggggaggggctcggacgcctggggcccgcccctgctgctggagaaggacgaccgtatcgtgcgcaccccgcccgggccacccctgcgcctggcgcgcaacggttcgcaccaggtcacgcttcgcggcttctccaagccctcggacctcgtgggcgtcttctcctgcgtgggcggtgctggggcgcggcgcacgcgcgtcatctacgtgcacaacagccctggagcccacctgcttccagacaaggtcacacacactgtgaacaaaggtgacaccgctgtactttctgcacgtgtgcacaaggagaagcagacagacgtgatctggaagagcaacggatcctacttctacaccctggactggcatgaagcccaggatgggcggttcctgctgcagctcccaaatgtgcagccaccatcgagcggcatctacagtgccacttacctggaagccagccccctgggcagcgccttctttcggctcatcgtgcggggtcagaggcagagggcagaggttgtgggtagggtgggaggctgggagccctatgggtacttcctgtgggtcccctggagcccctggatctccagtcctcagtggtcaggtgggtgagggtcagctgctgaagacaccttcctccaggttgtggggctgggcgctgggggccaggctgtaccaaggagtgcccaggttgcctacatggaggtgtctgccacgaccatgacggcgaatgtgtatgcccccctggcttcactggcacccgctgtgaacagg

SEQ ID NO: 253 - protein, 251 aa, Homo Sapiens
  SR006A04
MVWRVPPFLLPILFLASHVGAAVDLTLLANLRLTDPQRFFLTCVSGEAGAGRGSDAWGPPLLLEKDDRIVRTPPGPPLRLARNGSHQVTLRGFSKPSDLVGVFSCVGGAGARRTRVIYVHNSPGAHLLPDKVTHTVNKGDTAVLSARVHKEKQTDVIWKSNGSYFYTLDWHEAQDGRFLLQLPNVQPPSSGIYSATYLEASPLGSAFFRLIVRGQRQRAEVVGRVGGWEPYGYFLWVPWSPWISSPQWSGG

SEQ ID NO: 254 - DNA, 1619 bp, Homo Sapiens
  CDS (14)...(1153): SR006B07
cggcctctggagtatggtctggcgggtgccccctttcttgctccccatcctcttcttggcttctcatgtgggcgcggcggtggacctgacgctgctggccaacctgcggctcacggacccccagcgcttcttcctgacttgcgtgtctggggaggccggggcggggaggggctcggacgcctggggcccgcccctgctgctggagaaggacgaccgtatcgtgcgcaccccgcccgggccacccctgcgcctggcgcgcaacggttcgcaccaggtcacgcttcgcggcttctccaagccctcggacctcgtgggcgtcttctcctgcgtgggcggtgctggggcgcggcgcacgcgcgtcatctacgtgcacaacagccctggagcccacctgcttccagacaaggtcacacacactgtgaacaaaggtgacaccgctgtactttctgcacgtgtgcacaaggagaagcagacagacgtgatctggaagagcaacggatcctacttctacaccctggactggcatgaagcccaggatgggcggttcctgctgcagctcccaaatgtgcagccaccatcgagcggcatctacagtgccacttacctggaagccagccccctgggcagcgccttctttcggctcatcgtgcggggttgtggggctgggcgctgggggccaggctgtaccaaggagtgcccaggttgcctacatggaggtgtctgccacgaccatgacggcgaatgtgtatgcccccctggcttcactggcacccgctgtgaacaggcctgcagagagggccgttttgggcagagctgccaggagcagtgcccaggcatatcaggctgccggggcctcaccttctgcctcccagacccctatggctgctcttgtggatctggctggagaggaagccagtgccaagaagcttgtgcccctggtcattttggggctgattgccgactccagtgccagtgtcagaatggtggcacttgtgaccggttcagtggttgtgtctgcccctctgggtggcatggagtgcactgtgagaagtcaggctggagggactgggtagatacctccactgagaaacagaacacggatgaggggcgctttggtggtcacgtgtctgcccctgtgggagctccaggatgagtgtcctttctccccagaccggatcccccagatcctcaacatggcctcagaactggagttcaacttagagacgatgccccggatcaactgtgcagctgcagggaaccccttccccgtgcggggcagcatagagctacgcaagccagacggcactgtgctcctgtccaccaaggccattgtggagccagagaagaccacagctgagttcgaggtgccccgcttggttcttgcggacagtgggttctgggagtgccgtgtgtccacatctggcggccaagacagccggcgcttcaaggtcaatgtgaaagtgccccccgtgcccctggctgcacctcggctcctgaccaagcagagccgccagcttgtggtctccccgctggtctcgttctctggggatggacccatctccactgtccgcctgcactaccggccccaggacagtaccatggactggtcgaccattgtg

SEQ ID NO: 255 - protein, 379 aa, Homo Sapiens
  SR006B07
MVWRVPPFLLPILFLASHVGAAVDLTLLANLRLTDPQRFFLTCVSGEAGAGRGSDAWGPPLLLEKDDRIVRTPPGPPLRLARNGSHQVTLRGFSKPSDLVGVFSCVGGAGARRTRVIYVHNSPGAHLLPDKVTHTVNKGDTAVLSARVHKEKQTDVIWKSNGSYFYTLDWHEAQDGRFLLQLPNVQPPSSGIYSATYLEASPLGSAFFRLIVRGCGAGRWGPGCTKECPGCLHGGVCHDHDGECVCPPGFTGTRCEQACREGRFGQSCQEQCPGISGCRGLTFCLPDPYGCSCGSGWRGSQCQEACAPGHFGADCRLQCQCQNGGTCDRFSGCVCPSGWHGVHCEKSGWRDWVDTSTEKQNTDEGRFGGHVSAPVGAPG

SEQ ID NO: 256 - DNA, 740 bp, Homo Sapiens
  CDS (34)...(519): SR006B06
tcgtcctggctggcctgggtcggcctctggagtatggtctggcgggtgccccctttcttgctccccatcctcttcttggcttctcatgtgggcgcggcggtggacctgacgctgctggccaacctgcggctcacggacccccagcgcttcttcctgacttgcgtgtctggggaggccggggcggggaggggctcggacgcctggggcccgcccctgctgctggagaaggacgaccgtatcgtgcgcaccccgcccgggccacccctgcgcctggcgcgcaacggttcgcaccaggtcacgcttcgcggcttctccaagccctcggacctcgtgggcgtcttctcctgcgtgggcggtgctggggcgcggcgcacgcgcgtcatctacgtgcacaacagccctggaggtgagttaggcaggcggggggatggcgcggggaaaaccaggccgctgacccaccttccaccccgcagcccacctgcttccagacaaggtcacacacactgtgaacaaaggtgacaccgctgtactttctgcacgtgtgcacaaggagaagcagacagacgtgatctggaagagcaacggatcctacttctacaccctggactggcatgaagcccaggatgggcggttcctgctgcagctcccaaatgtgcagccaccatcgagcggcatctacagtgccacttacctggaagccagccccctgggcagcgccttctttcggctcatcgtgcggg

SEQ ID NO: 257 - protein, 161 aa, Homo Sapiens
  SR006B06
MVWRVPPFLLPILFLASHVGAAVDLTLLANLRLTDPQRFFLTCVSGEAGAGRGSDAWGPPLLLEKDDRIVRTPPGPPLRLARNGSHQVTLRGFSKPSDLVGVFSCVGGAGARRTRVIYVHNSPGGELGRRGDGAGKTRPLTHLPPRSPPASRQGHTHCEQR

SEQ ID NO: 258 - DNA, 1761 bp, Homo Sapiens
  CDS (14)...(1258): SR006B12
cggcctctggagtatggtctggcgggtgccccctttcttgctccccatcctcttcttggcttctcatgtgggcgcggcggtggacctgacgctgctggccaacctgcggctcacggacccccagcgcttcttcctgacttgcgtgtctggggaggccggggcggggaggggctcggacgcctggggcccgcccctgctgctggagaaggacgaccgtatcgtgcgcaccccgcccgggccacccctgcgcctggcgcgcaacggttcgcaccaggtcacgcttcgcggcttctccaagccctcggacctcgtgggcgtcttctcctgcgtgggcggtgctggggcgcggcgcacgcgcgtcatctacgtgcacaacagccctggagcccacctgcttccagacaaggtcacacacactgtgaacaaaggtgacaccgctgtactttctgcacgtgtgcacaaggagaagcagacagacgtgatctggaagagcaacggatcctacttctacaccctggactggcatgaagcccaggatgggcggttcctgctgcagctcccaaatgtgcagccaccatcgagcggcatctacagtgccacttacctggaagccagccccctgggcagcgccttctttcggctcatcgtgcggggttgtggggctgggcgctgggggccaggctgtaccaaggagtgcccaggttgcctacatggaggtgtctgccacgaccatgacggcgaatgtgtatgcccccctggcttcactggcacccgctgtgaacaggcctgcagagagggccgttttgggcagagctgccaggagcagtgcccaggcatatcaggctgccggggcctcaccttctgcctcccagacccctatggctgctcttgtggatctggctggagaggaagccagtgccaagaagcttgtgcccctggtcattttggggctgattgccgactccagtgccagtgtcagaatggtggcacttgtgaccggttcagtggttgtgtctgcccctctgggtggcatggagtgcactgtgagaagtcagaccggatcccccagatcctcaacatggcctcagaactggagttcaacttagagacgatgccccggatcaactgtgcagctgcagggaaccccttccccgtgcggggcagcatagagctacgcaagccagacggcactgtgctcctggtcagcccccaatcaccccaacccaccagcccctcaggccgcctgcttcacagctgatccctaagaccccctagtccctcagaactttctgcagggcccacccattggcctgaccattgctcacatgaggtcaggctgattggtgagggggctgccactgggcctctgtcctgccatcagtccagacggacacctgggtgcctgccacagaggtgcccgttccctgtgacctgtccccttcccccatctcttttagtccaccaaggccattgtggagccagagaagaccacagctgagttcgaggtgccccgcttggttcttgcggacagtgggttctgggagtgccgtgtgtccacatctggcggccaagacagccggcgcttcaaggtcaatgtgaaagtgccccccgtgcccctggctgcacctcggctcctgaccaagcagagccgccagcttgtggtctccccgctggtctcgttctctggggatggacccatctccactgtccgcctgcactaccggccccaggacagtaccatggactggtcgaccattgtgg

SEQ ID NO: 259 - protein, 414 aa, Homo Sapiens
  SR006B12
MVWRVPPFLLPILFLASHVGAAVDLTLLANLRLTDPQRFFLTCVSGEAGAGRGSDAWGPPLLLEKDDRIVRTPPGPPLRLARNGSHQVTLRGFSKPSDLVGVFSCVGGAGARRTRVIYVHNSPGAHLLPDKVTHTVNKGDTAVLSARVHKEKQTDVIWKSNGSYFYTLDWHEAQDGRFLLQLPNVQPPSSGIYSATYLEASPLGSAFFRLIVRGCGAGRWGPGCTKECPGCLHGGVCHDHDGECVCPPGFTGTRCEQACREGRFGQSCQEQCPGISGCRGLTFCLPDPYGCSCGSGWRGSQCQEACAPGHFGADCRLQCQCQNGGTCDRFSGCVCPSGWHGVHCEKSDRIPQILNMASELEFNLETMPRINCAAAGNPFPVRGSIELRKPDGTVLLVSPQSPQPTSPSGRLLHS

SEQ ID NO: 260 - DNA, 1230 bp, Homo Sapiens
  CDS (14)...(967): SR006B10
cggcctctggagtatggtctggcgggtgccccctttcttgctccccatcctcttcttggcttctcatgtgggcgcggcggtggacctgacgctgctggccaacctgcggctcacggacccccagcgcttcttcctgacttgcgtgtctggggaggccggggcggggaggggctcggacgcctggggcccgcccctgctgctggagaaggacgaccgtatcgtgcgcaccccgcccgggccacccctgcgcctggcgcgcaacggttcgcaccaggtcacgcttcgcggcttctccaagccctcggacctcgtgggcgtcttctcctgcgtgggcggtgctggggcgcggcgcacgcgcgtcatctacgtgcacaacagccctggagcccacctgcttccagacaaggtcacacacactgtgaacaaaggtgacaccgctgtactttctgcacgtgtgcacaaggagaagcagacagacgtgatctggaagagcaacggatcctacttctacaccctggactggcatgaagcccaggatgggcggttcctgctgcagctcccaaatgtgcagccaccatcgagcggcatctacagtgccacttacctggaagccagccccctgggcagcgccttctttcggctcatcgtgcggggttgtggggctgggcgctgggggccaggctgtaccaaggagtgcccaggttgcctacatggaggtgtctgccacgaccatgacggcgaatgtgtatgcccccctggcttcactggcacccgctgtgaacaggcctgcagagagggccgttttgggcagagctgccaggagcagtgcccaggcatatcaggctgccggggcctcaccttctgcctcccagacccctatggctgctcttgtggatctggctggagaggaagccagtgccaagaagtccaccaaggccattgtggagccagagaagaccacagctgagttcgaggtgccccgcttggttcttgcggacagtgggttctgggagtgccgtgtgtccacatctggcggccaagacagccggcgcttcaaggtcaatgtgaaagtgccccccgtgcccctggctgcacctcggctcctgaccaagcagagccgccagcttgtggtctccccgctggtctcgttctctggggatggacccatctccactgtccgcctgcactaccggccccaggacagtaccatggactggtcgaccattgtgg

SEQ ID NO: 261 - protein, 317 aa, Homo Sapiens
  SR006B10
MVWRVPPFLLPILFLASHVGAAVDLTLLANLRLTDPQRFFLTCVSGEAGAGRGSDAWGPPLLLEKDDRIVRTPPGPPLRLARNGSHQVTLRGFSKPSDLVGVFSCVGGAGARRTRVIYVHNSPGAHLLPDKVTHTVNKGDTAVLSARVHKEKQTDVIWKSNGSYFYTLDWHEAQDGRFLLQLPNVQPPSSGIYSATYLEASPLGSAFFRLIVRGCGAGRWGPGCTKECPGCLHGGVCHDHDGECVCPPGFTGTRCEQACREGRFGQSCQEQCPGISGCRGLTFCLPDPYGCSCGSGWRGSQCQEVHQGHCGAREDHS

SEQ ID NO: 262 - DNA, 2273 bp, Homo Sapiens
  SR016G03
ctctggagtatggtctggcgggtgccccctttcttgctccccatcctcttcttggcttctcatgtgggcgcggcggtggacctgacgctgctggccaacctgcggctcacggacccccagcgcttcttcctgacttgcgtgtctggggaggccggggcggggaggggctcggacgcctggggcccgcccctgctgctggagaaggacgaccgtatcgtgcgcaccccgcccgggccacccctgcgcctggcgcgcaacggttcgcaccaggtcacgcttcgcggcttctccaagccctcggacctcgtgggcgtcttctcctgcgtgggcggtgctggggcgcggcgcacgcgcgtcatctacgtgcacaacagccctggagcccacctgcttccagacaaggtcacacacactgtgaacaaaggtgacaccgctgtactttctgcacgtgtgcacaaggagaagcagacagacgtgatctggaagagcaacggatcctacttctacaccctggactggcatgaagcccaggatgggcggttcctgctgcagctcccaaatgtgcagccaccatcgagcggcatctacagtgccacttacctggaagccagccccctgggcagcgccttctttcggctcatcgtgcggggttgtggggctgggcgctgggggccaggctgtaccaaggagtgcccaggttgcctacatggaggtgtctgccacgaccatgacggcgaatgtgtatgcccccctggcttcactggcacccgctgtgaacaggcctgcagagagggccgttttgggcagagctgccaggagcagtgcccaggcatatcaggctgccggggcctcaccttctgcctcccagacccctatggctgctcttgtggatctggctggagaggaagccagtgccaagaagcttgtgcccctggtcattttggggctgattgccgactccagtgccagtgtcagaatggtggcacttgtgaccggttcagtggttgtgtctgcccctctgggtggcatggagtgcactgtgagaagtcagaccggatcccccagatcctcaacatggcctcagaactggagttcaacttagagacgatgccccggatcaactgtgcagctgcagggaaccccttccccgtgcggggcagcatagagctacgcaagccagacggcactgtgctcctgtccaccaaggccattgtggagccagagaagaccacagctgagttcgaggtgccccgcttggttcttgcggacagtgggttctgggagtgccgtgtgtccacatctggcggccaagacagccggcgcttcaaggtcaatgtgaaagtgccccccgtgcccctggctgcacctcggctcctgaccaagcagagccgccagcttgtggtctccccgctggtctcgttctctggggatggacccatctccactgtccgcctgcactaccggccccaggacagtaccatggactggtcgaccattgtggtggaccccagtgagaacgtgacgttaatgaacctgaggccaaagacaggatacagtgttcgtgtgcagctgagccggccaggggaaggaggagagggggcctgggggcctcccaccctcatgaccacagactgtcctgagcctttgttgcagccgtggttggagggctggcatgtggaaggcactgaccggctgcgagtgagctggtccttgcccttggtgcccgggccactggtgggcgacggtttcctgctgcgcctgtgggacgggacacgggggcaggagcggcgggagaacgtctcatccccccaggcccgcactgccctcctgacgggactcacgcctggcacccactaccagctggatgtgcagctctaccactgcaccctcctgggcccggcctcgccccctgcacacgtgcttctgccccccagtgggcctccagccccccgacacctccacgcccaggccctctcagactccgagatccagctgacatggaagcacccggaggctctgcctgggccaatatccaagtacgttgtggaggtgcaggtggctgggggtgcaggagacccactgtggatagacgtggacaggcctgaggagacaagcaccatcatccgtggcctcaacgccagcacgcgctacctcttccgcatgcgggccagcattcaggggctcggggactggagcaacacagtagaagagtccaccctgggcaacggtgagagggcagggcccacaggaccccccgggctctgagcggggag

SEQ ID NO: 263 - protein, 751 aa, Homo Sapiens
  SR016G03
MVWRVPPFLLPILFLASHVGAAVDLTLLANLRLTDPQRFFLTCVSGEAGAGRGSDAWGPPLLLEKDDRIVRTPPGPPLRLARNGSHQVTLRGFSKPSDLVGVFSCVGGAGARRTRVIYVHNSPGAHLLPDKVTHTVNKGDTAVLSARVHKEKQTDVIWKSNGSYFYTLDWHEAQDGRFLLQLPNVQPPSSGIYSATYLEASPLGSAFFRLIVRGCGAGRWGPGCTKECPGCLHGGVCHDHDGECVCPPGFTGTRCEQACREGRFGQSCQEQCPGISGCRGLTFCLPDPYGCSCGSGWRGSQCQEACAPGHFGADCRLQCQCQNGGTCDRFSGCVCPSGWHGVHCEKSDRIPQILNMASELEFNLETMPRINCAAAGNPFPVRGSIELRKPDGTVLLSTKAIVEPEKTTAEFEVPRLVLADSGFWECRVSTSGGQDSRRFKVNVKVPPVPLAAPRLLTKQSRQLVVSPLVSFSGDGPISTVRLHYRPQDSTMDWSTIVVDPSENVTLMNLRPKTGYSVRVQLSRPGEGGEGAWGPPTLMTTDCPEPLLQPWLEGWHVEGTDRLRVSWSLPLVPGPLVGDGFLLRLWDGTRGQERRENVSSPQARTALLTGLTPGTHYQLDVQLYHCTLLGPASPPAHVLLPPSGPPAPRHLHAQALSDSEIQLTWKHPEALPGPISKYVVEVQVAGGAGDPLWIDVDRPEETSTIIRGLNASTRYLFRMRASIQGLGDWSNTVEESTLGNGERAGPTGPPGL

SEQ ID NO: 264 - protein, 838 aa, Artificial Sequence
  TIE.IFP
MVWRVPPFLLPILFLASHVGAAVDLTLLANLRLTDPQRFFLTCVSGEAGAGRGSDAWGPPLLLEKDDRIVRTPPGPPLRLARNGSHQVTLRGFSKPSDLVGVFSCVGGAGARRTRVIYVHNSPGAHLLPDKVTHTVNKGDTAVLSARVHKEKQTDVIWKSNGSYFYTLDWHEAQDGRFLLQLPNVQPPSSGIYSATYLEASPLGSAFFRLIVRGCGAGRWGPGCTKECPGCLHGGVCHDHDGECVCPPGFTGTRCEQACREGRFGQSCQEQCPGISGCRGLTFCLPDPYGCSCGSGWRGSQCQEACAPGHFGADCRLQCQCQNGGTCDRFSGCVCPSGWHGVHCEKSDRIPQILNMASELEFNLETMPRINCAAAGNPFPVRGSIELRKPDGTVLLSTKAIVEPEKTTAEFEVPRLVLADSGFWECRVSTSGGQDSRRFKVNVKVPPVPLAAPRLLTKQSRQLVVSPLVSFSGDGPISTVRLHYRPQDSTMDWSTIVVDPSENVTLMNLRPKTGYSVRVQLSRPGEGGEGAWGPPTLMTTDCPEPLLQPWLEGWHVEGTDRLRVSWSLPLVPGPLVGDGFLLRLWDGTRGQERRENVSSPQARTALLTGLTPGTHYQLDVQLYHCTLLGPASPPAHVLLPPSGPPAPRHLHAQALSDSEIQLTWKHPEALPGPISKYVVEVQVAGGAGDPLWIDVDRPEETSTIIRGLNASTRYLFRMRASIQGLGDWSNTVEESTLGNGLQAEGPVQESRAAEEGLDQQLILAVVGSVSATCLTILAALLTLVCIRRSCLHRRRTFTYQSGSGEETILQFSSGTLTLTRRPKLQPEPLSYPVLEWED

SEQ ID NO: 265 - protein, 632 aa, Artificial Sequence
  TIE.IFP
MVWRVPPFLLPILFLASHVGAAVDLTLLANLRLTDPQRFFLTCVSGEAGAGRGSDAWGPPLLLEKDDRIVRTPPGPPLRLARNGSHQVTLRGFSKPSDLVGVFSCVGGAGARRTRVIYVHNSPGAHLLPDKVTHTVNKGDTAVLSARVHKEKQTDVIWKSNGSYFYTLDWHEAQDGRFLLQLPNVQPPSSGIYSATYLEASPLGSAFFRLIVRGCGAGRWGPGCTKECPGCLHGGVCHDHDGECVCPPGFTGTRCEQACREGRFGQSCQEQCPGISGCRGLTFCLPDPYGCSCGSGWRGSQCQEACAPGHFGADCRLQCQCQNGGTCDRFSGCVCPSGWHGVHCEKSDRIPQILNMASELEFNLETMPRINCAAAGNPFPVRGSIELRKPDGTVLLSTKAIVEPEKTTAEFEVPRLVLADSGFWECRVSTSGGQDSRRFKVNVKVPPVPLAAPRLLTKQSRQLVVSPLVSFSGDGPISTVRLHYRPQDSTMDWSTIVVDPSENVTLMNLRPKTGYSVRVQLSRPGEGGEGAWGPPTLMTTDCPEPLLQPWLEGWHVEGTDRLRVSWSLPLVPGPLVGDGFLLRLWDGTRGQERRENVSSPQARTALLTGLTPGTHYQLDVQLYHCTLLGPAS

SEQ ID NO: 266 - protein, 533 aa, Artificial Sequence
  TIE.IFP
MVWRVPPFLLPILFLASHVGAAVDLTLLANLRLTDPQRFFLTCVSGEAGAGRGSDAWGPPLLLEKDDRIVRTPPGPPLRLARNGSHQVTLRGFSKPSDLVGVFSCVGGAGARRTRVIYVHNSPGAHLLPDKVTHTVNKGDTAVLSARVHKEKQTDVIWKSNGSYFYTLDWHEAQDGRFLLQLPNVQPPSSGIYSATYLEASPLGSAFFRLIVRGCGAGRWGPGCTKECPGCLHGGVCHDHDGECVCPPGFTGTRCEQACREGRFGQSCQEQCPGISGCRGLTFCLPDPYGCSCGSGWRGSQCQEACAPGHFGADCRLQCQCQNGGTCDRFSGCVCPSGWHGVHCEKSDRIPQILNMASELEFNLETMPRINCAAAGNPFPVRGSIELRKPDGTVLLSTKAIVEPEKTTAEFEVPRLVLADSGFWECRVSTSGGQDSRRFKVNVKVPPVPLAAPRLLTKQSRQLVVSPLVSFSGDGPISTVRLHYRPQDSTMDWSTIVVDPSENVTLMNLRPKTGYSVRVQLSRPGEGGEGAWG

SEQ ID NO: 267 - protein, 428 aa, Artificial Sequence
  TIE.IFP
MVWRVPPFLLPILFLASHVGAAVDLTLLANLRLTDPQRFFLTCVSGEAGAGRGSDAWGPPLLLEKDDRIVRTPPGPPLRLARNGSHQVTLRGFSKPSDLVGVFSCVGGAGARRTRVIYVHNSPGAHLLPDKVTHTVNKGDTAVLSARVHKEKQTDVIWKSNGSYFYTLDWHEAQDGRFLLQLPNVQPPSSGIYSATYLEASPLGSAFFRLIVRGCGAGRWGPGCTKECPGCLHGGVCHDHDGECVCPPGFTGTRCEQACREGRFGQSCQEQCPGISGCRGLTFCLPDPYGCSCGSGWRGSQCQEACAPGHFGADCRLQCQCQNGGTCDRFSGCVCPSGWHGVHCEKSDRIPQILNMASELEFNLETMPRINCAAAGNPFPVRGSIELRKPDGTVLLSTKAIVEPEKTTAEFEVPRLVLADSGFWECRV

SEQ ID NO: 268 - protein, 344 aa, Artificial Sequence
  TIE.IFP
MVWRVPPFLLPILFLASHVGAAVDLTLLANLRLTDPQRFFLTCVSGEAGAGRGSDAWGPPLLLEKDDRIVRTPPGPPLRLARNGSHQVTLRGFSKPSDLVGVFSCVGGAGARRTRVIYVHNSPGAHLLPDKVTHTVNKGDTAVLSARVHKEKQTDVIWKSNGSYFYTLDWHEAQDGRFLLQLPNVQPPSSGIYSATYLEASPLGSAFFRLIVRGCGAGRWGPGCTKECPGCLHGGVCHDHDGECVCPPGFTGTRCEQACREGRFGQSCQEQCPGISGCRGLTFCLPDPYGCSCGSGWRGSQCQEACAPGHFGADCRLQCQCQNGGTCDRFSGCVCPSGWHGVHC

SEQ ID NO: 269 - protein, 255 aa, Artificial Sequence
  TIE.IFP
MVWRVPPFLLPILFLASHVGAAVDLTLLANLRLTDPQRFFLTCVSGEAGAGRGSDAWGPPLLLEKDDRIVRTPPGPPLRLARNGSHQVTLRGFSKPSDLVGVFSCVGGAGARRTRVIYVHNSPGAHLLPDKVTHTVNKGDTAVLSARVHKEKQTDVIWKSNGSYFYTLDWHEAQDGRFLLQLPNVQPPSSGIYSATYLEASPLGSAFFRLIVRGCGAGRWGPGCTKECPGCLHGGVCHDHDGECVCPPGFTGTRC

SEQ ID NO: 270 - protein, 197 aa, Artificial Sequence
  TIE.IFP
MVWRVPPFLLPILFLASHVGAAVDLTLLANLRLTDPQRFFLTCVSGEAGAGRGSDAWGPPLLLEKDDRIVRTPPGPPLRLARNGSHQVTLRGFSKPSDLVGVFSCVGGAGARRTRVIYVHNSPGAHLLPDKVTHTVNKGDTAVLSARVHKEKQTDVIWKSNGSYFYTLDWHEAQDGRFLLQLPNVQPPSSGIYSATY

SEQ ID NO: 271 - DNA, 913 bp, Homo sapiens
  SR003H02
agaaggcgctgggctgcgagggcgcgagggcgcgagggcagggggcaaccggaccccgcccgcacccatggcgcccgtcgccgtctgggccgcgctggccgtcggactggagctctgggctgcggcgcacgccttgcccgcccaggtggcatttacaccctacgccccggagcccgggagcacatgccggctcagagaatactatgaccagacagctcagatgtgctgcagcaaatgctcgccgggccaacatgcaaaagtcttctgtaccaagacctcggacaccgtgtgtgactcctgtgaggacagcacatacacccagctctggaactgggttcccgagtgcttgagctgtggctcccgctgtagctctgaccaggtggaaactcaagcctgcactcgggaacagaaccgcatctgcacctgcaggcccggctggtactgcgcgctgagcaagcaggaggggtgccggctgtgcgcgccgctgcgcaagtgccgcccgggcttcggcgtggccagaccagacctctcctagggctctagtgccaaggcccagctgtcccgcagagtgtctgagtggttgacaagttcggattgttccctgaaggaactgaaacatcagacgtggtgtgcaagccctgtgccccggggacgttctccaacacgacttcatccacggatatttgcaggccccaccagatctgtaacgtggtggccatccctgggaatgcaagcatggatgcagtctgcacgtccacgtcccccacccggagtatggccccaggggcagtacacttaccccagccagtgtccacacgatcccaacacacgcagccaactccagaacccagcactgctccaagcacctccttcctgctcccaatgggccccagccccccagctgaagggagca

SEQ ID NO: 272 - protein, 155 aa, Homo sapiens
  SR003H02
MAPVAVWAALAVGLELWAAAHALPAQVAFTPYAPEPGSTCRLREYYDQTAQMCCSKCSPGQHAKVFCTKTSDTVCDSCEDSTYTQLWNWVPECLSCGSRCSSDQVETQACTREQNRICTCRPGWYCALSKQEGCRLCAPLRKCRPGFGVARPDLS

SEQ ID NO: 273 - DNA, 923 bp, Homo Sapiens
  CDS (253)...(777): SR004C05
gcggacactcctctcggctcctccccggcagcggcggcggctcggagcgggctccggggctcgggtgcagcggccagcgggcgcctggcggcgaggattacccggggaagtggttgtctcctggctggagccgcgagacgggcgctcagggcgcggggccggcggcggcgaacgagaggacggactctggcggccgggtcgttggccgcggggagcgcgggcaccgggcgagcaggccgcgtcgcgctcaccatggtcagctactgggacaccggggtcctgctgtgcgcgctgctcagctgtctgcttctcacaggatctagttcaggttcaaaattaaaagatcctgaactgagtttaaaaggcacccagcacatcatgcaagcaggccagacactgcatctccaatgcaggggggaagcagcccataaatggtctttgcctgaaatggtgagtaaggaaagcgaaaggctgagcataactaaatctgcctgtggaagaaatggcaaacaattctgcagtactttaaccttgaacacagctcaagcaaaccacactggcttctacagctgcaaatatctagctgtacctacttcaaagaagaaggaaacagaatctgcaatctatatatttattagtgatacaggtagacctttcgtagagatgtacagtgaaatccccgaaattatacacatgactgaaggaagggagctcgtcattccctgccgggttacgtcacctaacatcactgttactttaaaaaagaagaaggcataaggagaaagtcagatcatggattattttcttctgtttggactcaccgtgcttgggaatacttctgagcattagagagcacttcattcattgcagagtctctggcctccgaggctgccttcaccatcagcagcttcagcttctgggag

SEQ ID NO: 274 - protein, 174 aa, Homo Sapiens [sequence omitted]

SEQ ID NO: 275 - protein, 479 aa, Homo sapiens
  FLT1.c 31
MVSYWDTGVLLCALLSCLLLTGSSSGSKLKDPELSLKGTQHIMQAGQTLHLQCRGEAAHKWSLPEMVSKESERLSITKSACGRNGKQFCSTLTLNTAQANHTGFYSCKYLAVPTSKKKETESAIYIFISDTGRPFVEMYSEIPEIIHMTEGRELVIPCRVTSPNITVTLKKFPLDTLIPDGKRIIWDSRKGFIISNATYKEIGLLTCEATVNGHLYKTNYLTHRQTNTIIDVQISTPRPVKLLRGHTLVLNCTATTPLNTRVQMTWSYPDEKNKRASVRRRIDQSNSHANIFYSVLTIDKMQNKDKGLYTCRVRSGPSFKSVNTSVHIYDKAFITVKHRKQQVLETVAGKRSYRLSMKVKAFPSPEVVWLKDGLPATEKSARYLTRGYSLIIKDVTEEDAGNYTILLSIKQSNVFKNLTATLIVNVKPQIYEKAVSSFPDPALYPLGSRQILTCTAYGIPQPTIKWFWHPCNHNHSEAR

SEQ ID NO: 276 - protein, 523 aa, Homo sapiens
  FLT1.c 32
MVSYWDTGVLLCALLSCLLLTGSSSGSKLKDPELSLKGTQHIMQAGQTLHLQCRGEAAHKWSLPEMVSKESERLSITKSACGRNGKQFCSTLTLNTAQANHTGFYSCKYLAVPTSKKKETESAIYIFISDTGRPFVEMYSEIPEIIHMTEGRELVIPCRVTSPNITVTLKKFPLDTLIPDGKRIIWDSRKGFIISNATYKEIGLLTCEATVNGHLYKTNYLTHRQTNTIIDVQISTPRPVKLLRGHTLVLNCTATTPLNTRVQMTWSYPDEKNKRASVRRRIDQSNSHANIFYSVLTIDKMQNKDKGLYTCRVRSGPSFKSVNTSVHIYDKAFITVKHRKQQVLETVAGKRSYRLSMKVKAFPSPEVVWLKDGLPATEKSARYLTRGYSLIIKDVTEEDAGNYTILLSIKQSNVFKNLTATLIVNVKPQIYEILTCTAYGIPQPTIKWFWHPCNHNHSEARCDFCSNNEESFILDADSNMGNRIESITQRMAIIEGKNKLPPANSSFMLPPTSFSSNYFHFLP

SEQ ID NO: 277 - protein, 436 aa, Homo sapiens
  FLT1.c 33
MVSYWDTGVLLCALLSCLLLTGSSSGSKLKDPELSLKGTQHIMQAGQTLHLQCRGEAAHKWSLPEMVSKESERLSITKSACGRNGKQFCSTLTLNTAQANHTGFYSCKYLAVPTSKKKETESAIYIFISDTGRPFVEMYSEIPEIIHMTEGRELVIPCRVTSPNITVTLKKFPLDTLIPDGKRIIWDSRKGFIISNATYKEIGLLTCEATVNGHLYKTNYLTHRQTNTIIDVQISTPRPVKLLRGHTLVLNCTATTPLNTRVQMTWSYPDEKNKRASVRRRIDQSNSHANIFYSVLTIDKMQNKDKGLYTCRVRSGPSFKSVNTSVHIYDKAFITVKHRKQQVLETVAGKRSYRLSMKVKAFPSPEVVWLKDGLPATEKSARYLTRGYSLIIKDKNLTATLIVNVKPQERIRERISPDLYRIWYPSTYNQVVLAPL

SEQ ID NO: 278 - protein, 365 aa, Homo sapiens
  FLT1.c 34
MVSYWDTGVLLCALLSCLLLTGSSSGSKLKDPELSLKGTQHIMQAGQTLHLQCRGEAAHKWSLPEMVSKESERLSITKSACGRNGKQFCSTLTLNTAQANHTGFYSCKYLAVPTSKKKETESAIYIFISDTGRPFVEMYSEIPEIIHMTEGRELVIPCRVTSPNITVTLKKFPLDTLIPDGKRIIWDSRKGFIISNATYKEIGLLTCEATVNGHLYKTNYLTHRQTNTIIDVQISTPRPVKLLRGHTLVLNCTATTPLNTRVQMTWSYPDEKNKRASVRRRIDQSNSHANIFYSVLTIDKMQNKDKGLYTCRVRSGPSFKSVNTSVHIYGKHSSALPTHAMLSNHCRCLCSLNKSVFCWPRVTLS

SEQ ID NO: 279 - protein, 541 aa, Homo sapiens
  SR018C02
MVSYWDTGVLLCALLSCLLLTGSSSGSKLKDPELSLKGTQHIMQAGQTLHLQCRGEAAHKWSLPEMVSKESERLSITKSACGRNGKQFCSTLTLNTAQANHTGFYSCKYLAVPTSKKKETESAIYIFISDTGRPFVEMYSEIPEIIHMTEGRELVIPCRVTSPNITVTLKKFPLDTLIPDGKRIIWDSRKGFIISNATYKEIGLLTCEATVNGHLYKTNYLTHRQTNTIIDVQISTPRPVKLLRGHTLVLNCTATTPLNTRVQMTWSYPDEKNKRASVRRRIDQSNSHANIFYSVLTIDKMQNKDKGLYTCRVRSGPSFKSVNTSVHIYDKAFITVKHRKQQVLETVAGKRSYRLSMKVKAFPSPEVVWLKDGLPATEKSARYLTRGYSLIIKDVTEEDAGNYTILLSIKQSNVFKNLTATLIVNVKPQIYEKAVSSFPDPALYPLGSRQILTCTAYGIPQPTIKWFWHPCNHNHSEARCDFCSNNEESFILDADSNMGNRIESITQRMAIIEGKNKLPPANSSFMLPPTSFSSNYFHFLP

SEQ ID NO: 280 - protein, 687 aa, Artificial Sequence
  FLT1.d BUILD 31
MVSYWDTGVLLCALLSCLLLTGSSSGSKLKDPELSLKGTQHIMQAGQTLHLQCRGEAAHKWSLPEMVSKESERLSITKSACGRNGKQFCSTLTLNTAQANHTGFYSCKYLAVPTSKKKETESAIYIFISDTGRPFVEMYSEIPEIIHMTEGRELVIPCRVTSPNITVTLKKFPLDTLIPDGKRIIWDSRKGFIISNATYKEIGLLTCEATVNGHLYKTNYLTHRQTNTIIDVQISTPRPVKLLRGHTLVLNCTATTPLNTRVQMTWSYPDEKNKRASVRRRIDQSNSHANIFYSVLTIDKMQNKDKGLYTCRVRSGPSFKSVNTSVHIYDKAFITVKHRKQQVLETVAGKRSYRLSMKVKAFPSPEVVWLKDGLPATEKSARYLTRGYSLIIKDVTEEDAGNYTILLSIKQSNVFKNLTATLIVNVKPQIYEKAVSSFPDPALYPLGSRQILTCTAYGIPQPTIKWFWHPCNHNHSEARCDFCSNNEESFILDADSNMGNRIESITQRMAIIEGKNKMASTLVVADSRISGIYICIASNKVGTVGRNISFYITDVPNGFHVNLEKMPTEGEDLKLSCTVNKFLYRDVTWILLRTVNNRTMHYSISKQKMAITKEHSITLNLTIMNVSLQDSGTYACRARNVYTGEEILQKKEITIRGEHCNKKAVFSRISKFKSTRNDCTTQSNVKH

SEQ ID NO: 281 - DNA, 2432 bp, Homo Sapiens
  SR015F01
catttcgcccggctcgaggtgcaggatgcagagcaaggtgctgctggccgtcgccctgtggctctgcgtggagacccgggccgcctctgtgggtttgcctagtgtttctcttgatctgcccaggctcagcatacaaaaagacatacttacaattaaggctaatacaactcttcaaattacttgcaggggacagagggacttggactggctttggcccaataatcagagtggcagtgagcaaagggtggaggtgactgagtgcagcgatggcctcttctgtaagacactcacaattccaaaagtgatcggaaatgacactggagcctacaagtgcttctaccgggaaactgacttggcctcggtcatttatgtctatgttcaagattacagatctccatttattgcttctgttagtgaccaacatggagtcgtgtacattactgagaacaaaaacaaaactgtggtgattccatgtctcgggtccatttcaaatctcaacgtgtcactttgtgcaagatacccagaaaagagatttgttcctgatggtaacagaatttcctgggacagcaagaagggctttactattcccagctacatgatcagctatgctggcatggtcttctgtgaagcaaaaattaatgatgaaagttaccagtctattatgtacatagttgtcgttgtagggtataggatttatgatgtggttctgagtccgtctcatggaattgaactatctgttggagaaaagcttgtcttaaattgtacagcaagaactgaactaaatgtggggattgacttcaactgggaatacccttcttcgaagcatcagcataagaaacttgtaaaccgagacctaaaaacccagtctgggagtgagatgaagaaatttttgagcaccttaactatagatggtgtaacccggagtgaccaaggattgtacacctgtgcagcatccagtgggctgatgaccaagaagaacagcacatttgtcagggtccatgaaaaaccttttgttgcttttggaagtggcatggaatctctggtggaagccacggtgggggagcgtgtcagaatccctgcgaagtaccttggttacccacccccagaaataaaatggtataaaaatggaataccccttgagtccaatcacacaattaaagcggggcatgtactgacgattatggaagtgagtgaaagagacacaggaaattacactgtcatccttaccaatcccatttcaaaggagaagcagagccatgtggtctctctggttgtgtatgtcccaccccagattggtgagaaatctctaatctctcctgtggattcctaccagtacggcaccactcaaacgctgacatgtacggtctatgccattcctcccccgcatcacatccactggtattggcagttggaggaagagtgcgccaacgagcccagccaagctgtctcagtgacaaacccatacccttgtgaagaatggagaagtgtggaggacttccagggaggaaataaaattgaagttaataaaaatcaatttgctctaattgaaggaaaaaacaaaactgtaagtacccttgttatccaagcggcaaatgtgtcagctttgtacaaatgtgaagcggtcaacaaagtcgggagaggagagagggtgatctccttccacgtgaccaggggtcctgaaattactttgcaacctgacatgcagcccactgagcaggagagcgtgtctttgtggtgcactgcagacagatctacgtttgagaacctcacatggtacaagcttggcccacagcctctgccaatccatgtgggagagttgcccacacctgtttgcaagaacttggatactctttggaaattgaatgccaccatgttctctaatagcacaaatgacattttgatcatggagcttaagaatgcatccttgcaggaccaaggagactatgtctgccttgctcaagacaggaagaccaagaaaagacattgcgtggtcaggcagctcacagtcctagagcgtgtggcacccacgatcacaggaaacctggagaatcagacgacaagtattggggaaagcatcgaagtctcatgcacggcatctgggaatccccctccacagatcatgtggtttaaagataatgagacccttgtagaagactcagagtgaggaaggaggacgaaggcctctacacctgccaggcatgcagtgttcttggctgtgcaaaagtggaggcatttttcataatagaaggtgcccaggaaaagacgaacttggaaatcattattctagtaggcacggcggtgattgccatgttcttctggctacttcttgtcatcatcctacggaccgttaagcgggccaatggaggggaactgaagacaggctacttgtccatcgtcatggatccagatgaactcccattggatgaacattg

SEQ ID NO: 282 - protein, 712 aa, Homo Sapiens
  SR015F01
MQSKVLLAVALWLCVETRAASVGLPSVSLDLPRLSIQKDILTIKANTTLQITCRGQRDLDWLWPNNQSGSEQRVEVTECSDGLFCKTLTIPKVIGNDTGAYKCFYRETDLASVIYVYVQDYRSPFIASVSDQHGVVYITENKNKTVVIPCLGSISNLNVSLCARYPEKRFVPDGNRISWDSKKGFTIPSYMISYAGMVFCEAKINDESYQSIMYIVVVVGYRIYDVVLSPSHGIELSVGEKLVLNCTARTELNVGIDFNWEYPSSKHQHKKLVNRDLKTQSGSEMKKFLSTLTIDGVTRSDQGLYTCAASSGLMTKKNSTFVRVHEKPFVAFGSGMESLVEATVGERVRIPAKYLGYPPPEIKWYKNGIPLESNHTIKAGHVLTIMEVSERDTGNYTVILTNPISKEKQSHVVSLVVYVPPQIGEKSLISPVDSYQYGTTQTLTCTVYAIPPPHHIHWYWQLEEECANEPSQAVSVTNPYPCEEWRSVEDFQGGNKIEVNKNQFALIEGKNKTVSTLVIQAANVSALYKCEAVNKVGRGERVISFHVTRGPEITLQPDMQPTEQESVSLWCTADRSTFENLTWYKLGPQPLPIHVGELPTPVCKNLDTLWKLNATMFSNSTNDILIMELKNASLQDQGDYVCLAQDRKTKKRHCVVRQLTVLERVAPTITGNLENQTTSIGESIEVSCTASGNPPPQIMWFKDNETLVEDSE

SEQ ID NO: 283 - DNA, 783 bp, Homo Sapiens
  CDS (17)...(700): SR007E10
cgcgcagcggccggagatgcagcggggcgccgcgctgtgcctgcgactgtggctctgcctgggactcctggacggcctggtgagtggctactccatgacccccccgaccttgaacatcacggaggagtcacacgtcatcgacaccggtgacagcctgtccatctcctgcaggggacagcaccccctcgagtgggcttggccaggagctcaggaggcgccagccaccggagacaaggacagcgaggacacgggggtggtgcgagactgcgagggcacagacgccaggccctactgcaaggtgttgctgctgcacgaggtacatgccaacgacacaggcagctacgtctgctactacaagtacatcaaggcacgcatcgagggcaccacggccgccagctcctacgtgttcgtgagaggaaggacgccatgtgggtgccctgtctggtgtccatccccggcctcaatgtcacgctgcgctcgcaaagctcggtgctgtggccagacgggcaggaggtggtgtgggatgaccggcggggcatgctcgtgtccacgccactgctgcacgatgccctgtacctgcagtgcgagaccacctggggagaccaggacttcctttccaaccccttcctggtgcacatcacaggcaacgagctctatgacatccagctgttgcccaggaagtcgctggagctgctggtaggggagaagctggtcctgaactgcaccgtgtgggctgagtttaactcaggtgtcacctttgactgggactacccagggaagcag

SEQ ID NO: 284 - protein, 227 aa, Homo Sapiens
  SR007E10
MQRGAALCLRLWLCLGLLDGLVSGYSMTPPTLNITEESHVIDTGDSLSISCRGQHPLEWAWPGAQEAPATGDKDSEDTGVVRDCEGTDARPYCKVLLLHEVHANDTGSYVCYYKYIKARIEGTTAASSYVFVRGRTPCGCPVWCPSPASMSRCARKARCCGQTGRRWCGMTGGACSCPRHCCTMPCTCSARPPGETRTSFPTPSWCTSQATSSMTSSCCPGSRWSCW

SEQ ID NO: 285 - DNA, 1356 bp, Homo Sapiens
  CDS (16)...(903): SR007F05
gcgcagcggccggagatgcagcggggcgccgcgctgtgcctgcgactgtggctctgcctgggactcctggacggcctggtgagtggctactccatgacccccccgaccttgaacatcacggaggagtcacacgtcatcgacaccggtgacagcctgtccatctcctgcaggggacagcaccccctcgagtgggcttggccaggagctcaggaggcgccagccaccggagacaaggacagcgaggacacgggggtggtgcgagactgcgagggcacagacgccaggccctactgcaaggtgttgctgctgcacgaggtacatgccaacgacacaggcagctacgtctgctactacaagtacatcaaggcacgcatcgagggcaccacggccgccagctcctacgtgttcgtgagagactttgagcagccattcatcaacaagcctgacacgctcttggtcaacaggaaggacgccatgtgggtgccctgtctggtgtccatccccggcctcaatgtcacgctgcgctcgcaaagctcggtgctgtggccagacgggcaggaggtggtgtgggatgaccggcggggcatgctcgtgtccacgccactgctgcacgatgccctgtacctgcagtgcgagaccacctggggagaccaggacttcctttccaaccccttcctggtgcacatcacaggcaacgagctctatgacatccagctgttgcccaggaagtcgctggagctgctggtaggggagaagctggtcctgaactgcaccgtgtgggctgagtttaactcaggtgtcacctttgactgggactacccagggaagcagaaaatcccttcatcagcgtcgagtggctcaaaggacccatcctggaggccacggcaggagacgagctggtgaagctgcccgtgaagctggcagcgtaccccccgcccgagttccagtggtacaaggatggaaaggcactgtccgggcgccacagtccacatgccctggtgctcaaggaggtgacagaggccagcacaggcacctacaccctcgccctgtggaactccgctgctggcctgaggcgcaacatcagcctggagctggtggtgaatgtgcccccccagatacatgagaaggaggcctcctcccccagcatctactcgcgtcacagccgccaggccctcacctgcacggcctacggggtgcccctgcctctcagcatccagtggcactggcggccctggacaccctgcaagatgtttgcccagcgtagtctccggcggcggcagcagcaagacctcatgccacagtgccgtgactggagggcggtgaccacgcaggatgccgtgaaccccatcgagagcc

SEQ ID NO: 286 - protein, 295 aa, Homo Sapiens
  SR007F05
MQRGAALCLRLWLCLGLLDGLVSGYSMTPPTLNITEESHVIDTGDSLSISCRGQHPLEWAWPGAQEAPATGDKDSEDTGVVRDCEGTDARPYCKVLLLHEVHANDTGSYVCYYKYIKARIEGTTAASSYVFVRDFEQPFINKPDTLLVNRKDAMWVPCLVSIPGLNVTLRSQSSVLWPDGQEVVWDDRRGMLVSTPLLHDALYLQCETTWGDQDFLSNPFLVHITGNELYDIQLLPRKSLELLVGEKLVLNCTVWAEFNSGVTFDWDYPGKQKIPSSASSGSKDPSWRPRQETSW

SEQ ID NO: 287 - DNA, 2620 bp, Homo Sapiens
  SR015G09
gcagcggccggagatgcagcggggcgccgcgctgtgcctgcgactgtggctctgcctgggactcctggacggcctggtgagtggctactccatgacccccccgaccttgaacatcacggaggagtcacacgtcatcgacaccggtgacagcctgtccatctcctgcaggggacagcaccccctcgagtgggcttggccaggagctcaggaggcgccagccaccggagacaaggacagcgaggacacgggggtggtgcgagactgcgagggcacagacgccaggccctactgcaaggtgttgctgctgcacgaggtacatgccaacgacacaggcagctacgtctgctactacaagtacatcaaggcacgcatcgagggcaccacggccgccagctcctacgtgttcgtgagagactttgagcagccattcatcaacaagcctgacacgctcttggtcaacaggaaggacgccatgtgggtgccctgtctggtgtccatccccggcctcaatgtcacgctgcgctcgcaaagctcggtgctgtggccagacgggcaggaggtggtgtgggatgaccggcggggcatgctcgtgtccacgccactgctgcacgatgccctgtacctgcagtgcgagaccacctggggagaccaggacttcctttccaaccccttcctggtgcacatcacaggcaacgagctctatgacatccagctgttgcccaggaagtcgctggagctgctggtaggggagaagctggtcctgaactgcaccgtgtgggctgagtttaactcaggtgtcacctttgactgggactacccagggaagcaggcagagcggggtaagtgggtgcccgagcgacgctcccagcagacccacacagaactctccagcatcctgaccatccacaacgtcagccagcacgacctgggctcgtatgtgtgcaaggccaacaacggcatccagcgatttcgggagagcaccgaggtcattgtgcatgaaaatcccttcatcagcgtcgagtggctcaaaggacccatcctggaggccacggcaggagacgagctggtgaagctgcccgtgaagctggcagcgtaccccccgcccgagttccagtggtacaaggatggaaaggcactgtccgggcgccacagtccacatgccctggtgctcaaggaggtgacagaggccagcacaggcacctacaccctcgccctgtggaactccgctgctggcctgaggcgcaacatcagcctggagctggtggtgaatgtgcccccccagatacatgagaaggaggcctcctcccccagcatctactcgcgtcacagccgccaggccctcacctgcacggcctacggggtgcccctgcctctcagcatccagtggcactggcggccctggacaccctgcaagatgtttgcccagcgtagtctccggcggcggcagcagcaagacctcatgccacagtgccgtgactggagggcggtgaccacgcaggatgccgtgaaccccatcgagagcctggacacctggaccgagtttgtggagggaaagaataagactgtgagcaagctggtgatccagaatgccaacgtgtctgccatgtacaagtgtgtggtctccaacaaggtgggccaggatgagcggctcatctacttctatgtgaccaccatccccgacggcttcaccatcgaatccaagccatccgaggagctactagagggccagccggtgctcctgagctgccaagccgacagctacaagtacgagcatctgcgctggtaccgcctcaacctgtccacgctgcacgatgcgcacgggaacccgcttctgctcgactgcaagaacgtgcatctgttcgccacccctctggccgccagcctggaggaggtggcacctggggcgcgccacgccacgctcagcctgagtatcccccgcgtcgcgcccgagcacgagggccactatgtgtgcgaagtgcaagaccggcgcagccatgacaagcactgccacaagaagtacctgtcggtgcaggccctggaagcccctcggctcacgcagaacttgaccgacctcctggtgaacgtgagcgactcgctggagatgcagtgcttggtggccggagcgcacgcgcccagcatcgtgtggtacaaagacgagaggctgctggaggaaaagtctggtagggagggtggccctggcgaagggcaggtccggaggcccgcgaggccgacgatcccaaacccaggtggacccgcacctccaccccaccccctgcaggagtcgacttggcggactccaaccagaagctgagcatccagcgcgtgcgcgaggaggatgcgggacgctatctgtgcagcgtgtgcaacgccaagggctgcgtcaactcctccgccagcgtggccgtggaaggctccgaggataagggcagcatggagatcgtgatccttgtcggtaccggcgtcatcgctgtcttcttctgggtcctcctcctcctcatcttctgtaacatgaggaggccggcccacgcagacatcaagacgggctacctgtccatcatcatggaccccggggaggtgcctctggaggagcaatgcgaatacctgtcctacgatgccagcc

SEQ ID NO: 288 - protein, 765 aa, Homo Sapiens
  SR015G09
MQRGAALCLRLWLCLGLLDGLVSGYSMTPPTLNITEESHVIDTGDSLSISCRGQHPLEWAWPGAQEAPATGDKDSEDTGVVRDCEGTDARPYCKVLLLHEVHANDTGSYVCYYKYIKARIEGTTAASSYVFVRDFEQPFINKPDTLLVNRKDAMWVPCLVSIPGLNVTLRSQSSVLWPDGQEVVWDDRRGMLVSTPLLHDALYLQCETTWGDQDFLSNPFLVHITGNELYDIQLLPRKSLELLVGEKLVLNCTVWAEFNSGVTFDWDYPGKQAERGKWVPERRSQQTHTELSSILTIHNVSQHDLGSYVCKANNGIQRFRESTEVIVHENPFISVEWLKGPILEATAGDELVKLPVKLAAYPPPEFQWYKDGKALSGRHSPHALVLKEVTEASTGTYTLALWNSAAGLRRNISLELVVNVPPQIHEKEASSPSIYSRHSRQALTCTAYGVPLPLSIQWHWRPWTPCKMFAQRSLRRRQQQDLMPQCRDWRAVTTQDAVNPIESLDTWTEFVEGKNKTVSKLVIQNANVSAMYKCVVSNKVGQDERLIYFYVTTIPDGFTIESKPSEELLEGQPVLLSCQADSYKYEHLRWYRLNLSTLHDAHGNPLLLDCKNVHLFATPLAASLEEVAPGARHATLSLSIPRVAPEHEGHYVCEVQDRRSHDKHCHKKYLSVQALEAPRLTQNLTDLLVNVSDSLEMQCLVAGAHAPSIVWYKDERLLEEKSGREGGPGEGQVRRPARPTIPNPGGPAPPPHPLQESTWRTPTRS

SEQ ID NO: 289 - protein, 419 aa, Homo sapiens
  Herstatin
MELAALCRWGLLLALLPPGAASTQVCTGTDMKLRLPASPETHLDMLRHLYQGCQVVQGNLELTYLPTNASLSFLQDIQEVQGYVLIAHNQVRQVPLQRLRIVRGTQLFEDNYALAVLDNGDPLNNTTPVTGASPGGLRELQLRSLTEILKGGVLIQRNPQLCYQDTILWKDIFHKNNQLALTLIDTNRSRACHPCSPMCKGSRCWGESSEDCQSLTRTVCAGGCARCKGPLPTDCCHEQCAAGCTGPKHSDCLACLHFNHSGICELHCPALVTYNTDTFESMPNPEGRYTFGASCVTACPYNYLSTDVGSCTLVCPLHNQEVTAEDGTQRCEKCSKPCARGTHSLPPRPAAVPVPLRMQPGPAHPVLSFLRPSWDLVSAFYSLPLAPLDPTSVPISPVSVGRGPSPDAHVAVDLSRYEG

SEQ ID NO: 290 - protein, 419 aa, Homo sapiens
  Herstatin variant
  VARIANT 342: Xaa= Thr or Ser
MELAALCRWGLLLALLPPGAASTQVCTGTDMKLRLPASPETHLDMLRHLYQGCQVVQGNLELTYLPTNASLSFLQDIQEVQGYVLIAHNQVRQVPLQRLRIVRGTQLFEDNYALAVLDNGDPLNNTTPVTGASPGGLRELQLRSLTEILKGGVLIQRNPQLCYQDTILWKDIFHKNNQLALTLIDTNRSRACHPCSPMCKGSRCWGESSEDCQSLTRTVCAGGCARCKGPLPTDCCHEQCAAGCTGPKHSDCLACLHFNHSGICELHCPALVTYNTDTFESMPNPEGRYTFGASCVTACPYNYLSTDVGSCTLVCPLHNQEVTAEDGTQRCEKCSKPCARGXHSLPPRPAAVPVPLRMQPGPAHPVLSFLRPSWDLVSAFYSLPLAPLSPTSVPISPVSVGRGPDPDAHVAVDLSRYEG

SEQ ID NO: 291 - protein, 419 aa, Homo sapiens
  Herstatin variant
  VARIANT 345: Xaa= Leu or Pro
MELAALCRWGLLLALLPPGAASTQVCTGTDMKLRLPASPETHLDMLRHLYQGCQVVQGNLELTYLPTNASLSFLQDIQEVQGYVLIAHNQVRQVPLQRLRIVRGTQLFEDNYALAVLDNGDPLNNTTPVTGASPGGLRELQLRSLTEILKGGVLIQRNPQLCYQDTILWKDIFHKNNQLALTLIDTNRSRACHPCSPMCKGSRCWGESSEDCQSLTRTVCAGGCARCKGPLPTDCCHEQCAAGCTGPKHSDCLACLHFNHSGICELHCPALVTYNTDTFESMPNPEGRYTFGASCVTACPYNYLSTDVGSCTLVCPLHNQEVTAEDGTQRCEKCSKPCARGTHSXPPRPAAVPVPLRMQPGPAHPVLSFLRPSWDLVSAFYSLPLAPLSPTSVPISPVSVGRGPDPDAHVAVDLSRYEG

SEQ ID NO: 292 - protein, 419 aa, Homo sapiens
  Herstatin variant
  VARIANT 346: Xaa= Pro or Leu
MELAALCRWGLLLALLPPGAASTQVCTGTDMKLRLPASPETHLDMLRHLYQGCQVVQGNLELTYLPTNASLSFLQDIQEVQGYVLIAHNQVRQVPLQRLRIVRGTQLFEDNYALAVLDNGDPLNNTTPVTGASPGGLRELQLRSLTEILKGGVLIQRNPQLCYQDTILWKDIFHKNNQLALTLIDTNRSRACHPCSPMCKGSRCWGESSEDCQSLTRTVCAGGCARCKGPLPTDCCHEQCAAGCTGPKHSDCLACLHFNHSGICELHCPALVTYNTDTFESMPNPEGRYTFGASCVTACPYNYLSTDVGSCTLVCPLHNQEVTAEDGTQRCEKCSKPCARGTHSLXPRPAAVPVPLRMQPGPAHPVLSFLRPSWDLVSAFYSLPLAPLSPTSVPISPVSVGRGPDPDAHVAVDLSRYEG

SEQ ID NO: 293 - protein, 419 aa, Homo sapiens
  Herstatin variant
  VARIANT 356: Xaa= Leu or Gln
MELAALCRWGLLLALLPPGAASTQVCTGTDMKLRLPASPETHLDMLRHLYQGCQVVQGNLELTYLPTNASLSFLQDIQEVQGYVLIAHNQVRQVPLQRLRIVRGTQLFEDNYALAVLDNGDPLNNTTPVTGASPGGLRELQLRSLTEILKGGVLIQRNPQLCYQDTILWKDIFHKNNQLALTLIDTNRSRACHPCSPMCKGSRCWGESSEDCQSLTRTVCAGGCARCKGPLPTDCCHEQCAAGCTGPKHSDCLACLHFNHSGICELHCPALVTYNTDTFESMPNPEGRYTFGASCVTACPYNYLSTDVGSCTLVCPLHNQEVTAEDGTQRCEKCSKPCARGTHSLPPRPAAVPVPXRMQPGPAHPVLSFLRPSWDLVSAFYSLPLAPLSPTSVPISPVSVGRGPDPDAHVAVDLSRYEG

SEQ ID NO: 294 - protein, 419 aa, Homo sapiens
  Herstatin variant
  VARIANT 357: Xaa= Arg or Cys
MELAALCRWGLLLALLPPGAASTQVCTGTDMKLRLPASPETHLDMLRHLYQGCQVVQGNLELTYLPTNASLSFLQDIQEVQGYVLIAHNQVRQVPLQRLRIVRGTQLFEDNYALAVLDNGDPLNNTTPVTGASPGGLRELQLRSLTEILKGGVLIQRNPQLCYQDTILWKDIFHKNNQLALTLIDTNRSRACHPCSPMCKGSRCWGESSEDCQSLTRTVCAGGCARCKGPLPTDCCHEQCAAGCTGPKHSDCLACLHFNHSGICELHCPALVTYNTDTFESMPNPEGRYTFGASCVTACPYNYLSTDVGSCTLVCPLHNQEVTAEDGTQRCEKCSKPCARGTHSLPPRPAAVPVPLXMQPGPAHPVLSFLRPSWDLVSAFYSLPLAPLSPTSVPISPVSVGRGPDPDAHVAVDLSRYEG

SEQ ID NO: 295 - protein, 419 aa, Homo sapiens
  Herstatin variant
  VARIANT 358: Xaa= Met or Leu
MELAALCRWGLLLALLPPGAASTQVCTGTDMKLRLPASPETHLDMLRHLYQGCQVVQGNLELTYLPTNASLSFLQDIQEVQGYVLIAHNQVRQVPLQRLRIVRGTQLFEDNYALAVLDNGDPLNNTTPVTGASPGGLRELQLRSLTEILKGGVLIQRNPQLCYQDTILWKDIFHKNNQLALTLIDTNRSRACHPCSPMCKGSRCWGESSEDCQSLTRTVCAGGCARCKGPLPTDCCHEQCAAGCTGPKHSDCLACLHFNHSGICELHCPALVTYNTDTFESMPNPEGRYTFGASCVTACPYNYLSTDVGSCTLVCPLHNQEVTAEDGTQRCEKCSKPCARGTHSLPPRPAAVPVPLRXQPGPAHPVLSFLRPSWDLVSAFYSLPLAPLSPTSVPISPVSVGRGPDPDAHVAVDLSRYEG

SEQ ID NO: 296 - protein, 419 aa, Homo sapiens; identical to SEQ ID NO: 295
  Herstatin variant
  VARIANT 358: Xaa= Met or Ile

SEQ ID NO: 297 - protein, 419 aa, Homo sapiens
  Herstatin variant
  VARIANT 361: Xaa= Gly, Asp, Ala, or Val
MELAALCRWGLLLALLPPGAASTQVCTGTDMKLRLPASPETHLDMLRHLYQGCQVVQGNLELTYLPTNASLSFLQDIQEVQGYVLIAHNQVRQVPLQRLRIVRGTQLFEDNYALAVLDNGDPLNNTTPVTGASPGGLRELQLRSLTEILKGGVLIQRNPQLCYQDTILWKDIFHKNNQLALTLIDTNRSRACHPCSPMCKGSRCWGESSEDCQSLTRTVCAGGCARCKGPLPTDCCHEQCAAGCTGPKHSDCLACLHFNHSGICELHCPALVTYNTDTFESMPNPEGRYTFGASCVTACPYNYLSTDVGSCTLVCPLHNQEVTAEDGTQRCEKCSKPCARGTHSLPPRPAAVPVPLRMQPXPAHPVLSFLRPSWDLVSAFYSLPLAPLSPTSVPISPVSVGRGPDPDAHVAVDLSRYEG

SEQ ID NO: 298 - protein, 419 aa, Homo sapiens
  Herstatin variant
  VARIANT 371: Xaa= Arg or Ile
MELAALCRWGLLLALLPPGAASTQVCTGTDMKLRLPASPETHLDMLRHLYQGCQVVQGNLELTYLPTNASLSFLQDIQEVQGYVLIAHNQVRQVPLQRLRIVRGTQLFEDNYALAVLDNGDPLNNTTPVTGASPGGLRELQLRSLTEILKGGVLIQRNPQLCYQDTILWKDIFHKNNQLALTLIDTNRSRACHPCSPMCKGSRCWGESSEDCQSLTRTVCAGGCARCKGPLPTDCCHEQCAAGCTGPKHSDCLACLHFNHSGICELHCPALVTYNTDTFESMPNPEGRYTFGASCVTACPYNYLSTDVGSCTLVCPLHNQEVTAEDGTQRCEKCSKPCARGTHSLPPRPAAVPVPLRMQPGPAHPVLSFLXPSWDLVSAFYSLPLAPLSPTSVPISPVSVGRGPDPDAHVAVDLSRYEG

SEQ ID NO: 299 - protein, 419 aa, Homo sapiens
  Herstatin variant
  VARIANT 376: Xaa= Leu or Ile
MELAALCRWGLLLALLPPGAASTQVCTGTDMKLRLPASPETHLDMLRHLYQGCQVVQGNLELTYLPTNASLSFLQDIQEVQGYVLIAHNQVRQVPLQRLRIVRGTQLFEDNYALAVLDNGDPLNNTTPVTGASPGGLRELQLRSLTEILKGGVLIQRNPQLCYQDTILWKDIFHKNNQLALTLIDTNRSRACHPCSPMCKGSRCWGESSEDCQSLTRTVCAGGCARCKGPLPTDCCHEQCAAGCTGPKHSDCLACLHFNHSGICELHCPALVTYNTDTFESMPNPEGRYTFGASCVTACPYNYLSTDVGSCTLVCPLHNQEVTAEDGTQRCEKCSKPCARGTHSLPPRPAAVPVPLRMQPGPAHPVLSFLRPSWDXVSAFYSLPLAPLSPTSVPISPVSVGRGPDPDAHVAVDLSRYEG

SEQ ID NO: 300 - protein, 419 aa, Homo sapiens
  Herstatin variant
  VARIANT 394: Xaa= Pro or Arg
MELAALCRWGLLLALLPPGAASTQVCTGTDMKLRLPASPETHLDMLRHLYQGCQVVQGNLELTYLPTNASLSFLQDIQEVQGYVLIAHNQVRQVPLQRLRIVRGTQLFEDNYALAVLDNGDPLNNTTPVTGASPGGLRELQLRSLTEILKGGVLIQRNPQLCYQDTILWKDIFHKNNQLALTLIDTNRSRACHPCSPMCKGSRCWGESSEDCQSLTRTVCAGGCARCKGPLPTDCCHEQCAAGCTGPKHSDCLACLHFNHSGICELHCPALVTYNTDTFESMPNPEGRYTFGASCVTACPYNYLSTDVGSCTLVCPLHNQEVTAEDGTQRCEKCSKPCARGTHSLPPRPAAVPVPLRMQPGPAHPVLSFLRPSWDLVSAFYSLPLAPLSPTSVXISPVSVGRGPDPDAHVAVDLSRYEG

SEQ ID NO: 301 - protein, 419 aa, Homo sapiens
  Herstatin variant
  VARIANT 404: Xaa= Pro or Leu
MELAALCRWGLLLALLPPGAASTQVCTGTDMKLRLPASPETHLDMLRHLYQGCQVVQGNLELTYLPTNASLSFLQDIQEVQGYVLIAHNQVRQVPLQRLRIVRGTQLFEDNYALAVLDNGDPLNNTTPVTGASPGGLRELQLRSLTEILKGGVLIQRNPQLCYQDTILWKDIFHKNNQLALTLIDTNRSRACHPCSPMCKGSRCWGESSEDCQSLTRTVCAGGCARCKGPLPTDCCHEQCAAGCTGPKHSDCLACLHFNHSGICELHCPALVTYNTDTFESMPNPEGRYTFGASCVTACPYNYLSTDVGSCTLVCPLHNQEVTAEDGTQRCEKCSKPCARGTHSLPPRPAAVPVPLRMQPGPAHPVLSFLRPSWDLVSAFYSLPLAPLSPTSVPISPVSVGRGXDPDAHVAVDLSRYEG

SEQ ID NO: 302 - protein, 419 aa, Homo sapiens
  Herstatin variant
  VARIANT 413: Xaa= Asp, Asn, or His
MELAALCRWGLLLALLPPGAASTQVCTGTDMKLRLPASPETHLDMLRHLYQGCQVVQGNLELTYLPTNASLSFLQDIQEVQGYVLIAHNQVRQVPLQRLRIVRGTQLFEDNYALAVLDNGDPLNNTTPVTGASPGGLRELQLRSLTEILKGGVLIQRNPQLCYQDTILWKDIFHKNNQLALTLIDTNRSRACHPCSPMCKGSRCWGESSEDCQSLTRTVCAGGCARCKGPLPTDCCHEQCAAGCTGPKHSDCLACLHFNHSGICELHCPALVTYNTDTFESMPNPEGRYTFGASCVTACPYNYLSTDVGSCTLVCPLHNQEVTAEDGTQRCEKCSKPCARGTHSLPPRPAAVPVPLRMQPGPAHPVLSFLRPSWDLVSAFYSLPLAPLSPTSVPISPVSVGRGPDPDAHVAVXLSRYEG

SEQ ID NO: 303 - protein, 419 aa, Homo sapiens
  Herstatin variant
  VARIANT 346: Xaa= Pro or Leu
  VARIANT 413: Xaa= Asp, His, or Asn
MELAALCRWGLLLALLPPGAASTQVCTGTDMKLRLPASPETHLDMLRHLYQGCQVVQGNLELTYLPTNASLSFLQDIQEVQGYVLIAHNQVRQVPLQRLRIVRGTQLFEDNYALAVLDNGDPLNNTTPVTGASPGGLRELQLRSLTEILKGGVLIQRNPQLCYQDTILWKDIFHKNNQLALTLIDTNRSRACHPCSPMCKGSRCWGESSEDCQSLTRTVCAGGCARCKGPLPTDCCHEQCAAGCTGPKHSDCLACLHFNHSGICELHCPALVTYNTDTFESMPNPEGRYTFGASCVTACPYNYLSTDVGSCTLVCPLHNQEVTAEDGTQRCEKCSKPCARGTHSLXPRPAAVPVPLRMQPGPAHPVLSFLRPSWDLVSAFYSLPLAPLSPTSVPISPVSVGRGPDPDAHVAVXLSRYEG

SEQ ID NO: 304 - DNA, 1316 bp, Homo sapiens
  Herstatin
gcagtgagcaccatggagctggcggccttgtgccgctgggggctcctcctcgccctcttgccccccggagccgcgagcacccaagtgtgcaccggcacagacatgaagctgcggctccctgccagtcccgagacccacctggacatgctccgccacctctaccagggatgccaggtggtgcagggaaacctggaactcacctacctgcccaccaatgccagcctgtccttcctgcaggatatccaggaggtgcagggctacgtgctcatcgctcacaaccaagtgaggcaggtcccactgcagaggctgcggattgtgcgaggcacccagctctttgaggacaactatgccctggccgtgctagacaatggagacccgctgaacaataccacccctgtcacaggggcctccccaggaggcctgcgggagctgcagcttcgaagcctcacagagatcttgaaaggaggggtcttgatccagcggaacccccagctctgctaccaggacacgattttgtggaaggacatcttccacaagaacaaccagctggctctcacactgatagacaccaaccgctctcgggcctgccacccctgctctccgatgtgtaagggctcccgctgctggggagagagttctgaggattgtcagagcctgacgcgcactgtctgtgccggtggctgtgcccgctgcaaggggccactgcccactgactgctgccatgagcagtgtgctgccggctgcacgggccccaagcactctgactgcctggcctgcctccacttcaaccacagtggcatctgtgagctgcactgcccagccctggtcacctacaacacagacacgtttgagtccatgcccaatcccgagggccggtatacattcggcgccagctgtgtcactgcctgtccctacaactacctttctacggacgtgggatcctgcaccctcgtctgccccctgcacaaccaagaggtgacagcagaggatggaacacagcggtgtgagaagtgcagcaagccctgtgcccgaggtacccactcactgcccccgaggccagctgcagttcctgtccctctgcgcatgcagcctggcccagcccaccctgtcctatccttcctcagaccctcttgggacctagtctctgccttctactctctacccctggcccccctcagccctacaagtgtccctatatcccctgtcagtgtggggaggggcccggaccctgatgctcatgtggctgttgacctgtcccggtatgaaggctgagacggccccttccccacccacccccacctcctcagtgtgctatg

SEQ ID NO: 305 - DNA, 1316 bp, Homo sapiens
  Herstatin variant
  allele 1036: n= A or T
gcagtgagcaccatggagctggcggccttgtgccgctgggggctcctcctcgccctcttgccccccggagccgcgagcacccaagtgtgcaccggcacagacatgaagctgcggctccctgccagtcccgagacccacctggacatgctccgccacctctaccagggatgccaggtggtgcagggaaacctggaactcacctacctgcccaccaatgccagcctgtccttcctgcaggatatccaggaggtgcagggctacgtgctcatcgctcacaaccaagtgaggcaggtcccactgcagaggctgcggattgtgcgaggcacccagctctttgaggacaactatgccctggccgtgctagacaatggagacccgctgaacaataccacccctgtcacaggggcctccccaggaggcctgcgggagctgcagcttcgaagcctcacagagatcttgaaaggaggggtcttgatccagcggaacccccagctctgctaccaggacacgattttgtggaaggacatcttccacaagaacaaccagctggctctcacactgatagacaccaaccgctctcgggcctgccacccctgctctccgatgtgtaagggctcccgctgctggggagagagttctgaggattgtcagagcctgacgcgcactgtctgtgccggtggctgtgcccgctgcaaggggccactgcccactgactgctgccatgagcagtgtgctgccggctgcacgggccccaagcactctgactgcctggcctgcctccacttcaaccacagtggcatctgtgagctgcactgcccagccctggtcacctacaacacagacacgtttgagtccatgcccaatcccgagggccggtatacattcggcgccagctgtgtcactgcctgtccctacaactacctttctacggacgtgggatcctgcaccctcgtctgccccctgcacaaccaagaggtgacagcagaggatggaacacagcggtgtgagaagtgcagcaagccctgtgcccgaggtncccactcactgcccccgaggccagctgcagttcctgtccctctgcgcatgcagcctggcccagcccaccctgtcctatccttcctcagaccctcttgggacctagtctctgccttctactctctacccctggcccccctcagccctacaagtgtccctatatcccctgtcagtgtggggaggggcccggaccctgatgctcatgtggctgttgacctgtcccggtatgaaggctgagacggccccttccccacccacccccacctcctcagtgtgctatg

SEQ ID NO: 306 - DNA, 1316 bp, Homo sapiens
  Herstatin variant
  allele 1046: n= T or C
gcagtgagcaccatggagctggcggccttgtgccgctgggggctcctcctcgccctcttgccccccggagccgcgagcacccaagtgtgcaccggcacagacatgaagctgcggctccctgccagtcccgagacccacctggacatgctccgccacctctaccagggatgccaggtggtgcagggaaacctggaactcacctacctgcccaccaatgccagcctgtccttcctgcaggatatccaggaggtgcagggctacgtgctcatcgctcacaaccaagtgaggcaggtcccactgcagaggctgcggattgtgcgaggcacccagctctttgaggacaactatgccctggccgtgctagacaatggagacccgctgaacaataccacccctgtcacaggggcctccccaggaggcctgcgggagctgcagcttcgaagcctcacagagatcttgaaaggaggggtcttgatccagcggaacccccagctctgctaccaggacacgattttgtggaaggacatcttccacaagaacaaccagctggctctcacactgatagacaccaaccgctctcgggcctgccacccctgctctccgatgtgtaagggctcccgctgctggggagagagttctgaggattgtcagagcctgacgcgcactgtctgtgccggtggctgtgcccgctgcaaggggccactgcccactgactgctgccatgagcagtgtgctgccggctgcacgggccccaagcactctgactgcctggcctgcctccacttcaaccacagtggcatctgtgagctgcactgcccagccctggtcacctacaacacagacacgtttgagtccatgcccaatcccgagggccggtatacattcggcgccagctgtgtcactgcctgtccctacaactacctttctacggacgtgggatcctgcaccctcgtctgccccctgcacaaccaagaggtgacagcagaggatggaacacagcggtgtgagaagtgcagcaagccctgtgcccgaggtacccactcacngcccccgaggccagctgcagttcctgtccctctgcgcatgcagcctggcccagcccaccctgtcctatccttcctcagaccctcttgggacctagtctctgccttctactctctacccctggcccccctcagccctacaagtgtccctatatcccctgtcagtgtggggaggggcccggaccctgatgctcatgtggctgttgacctgtcccggtatgaaggctgagacggccccttccccacccacccccacctcctcagtgtgctatg

SEQ ID NO: 307 - DNA, 1316 bp, Homo sapiens
  Herstatin variant
  allele 1049: n= C or T
gcagtgagcaccatggagctggcggccttgtgccgctgggggctcctcctcgccctcttgccccccggagccgcgagcacccaagtgtgcaccggcacagacatgaagctgcggctccctgccagtcccgagacccacctggacatgctccgccacctctaccagggatgccaggtggtgcagggaaacctggaactcacctacctgcccaccaatgccagcctgtccttcctgcaggatatccaggaggtgcagggctacgtgctcatcgctcacaaccaagtgaggcaggtcccactgcagaggctgcggattgtgcgaggcacccagctctttgaggacaactatgccctggccgtgctagacaatggagacccgctgaacaataccacccctgtcacaggggcctccccaggaggcctgcgggagctgcagcttcgaagcctcacagagatcttgaaaggaggggtcttgatccagcggaacccccagctctgctaccaggacacgattttgtggaaggacatcttccacaagaacaaccagctggctctcacactgatagacaccaaccgctctcgggcctgccacccctgctctccgatgtgtaagggctcccgctgctggggagagagttctgaggattgtcagagcctgacgcgcactgtctgtgccggtggctgtgcccgctgcaaggggccactgcccactgactgctgccatgagcagtgtgctgccggctgcacgggccccaagcactctgactgcctggcctgcctccacttcaaccacagtggcatctgtgagctgcactgcccagccctggtcacctacaacacagacacgtttgagtccatgcccaatcccgagggccggtatacattcggcgccagctgtgtcactgcctgtccctacaactacctttctacggacgtgggatcctgcaccctcgtctgccccctgcacaaccaagaggtgacagcagaggatggaacacagcggtgtgagaagtgcagcaagccctgtgcccgaggtacccactcactgcncccgaggccagctgcagttcctgtccctctgcgcatgcagcctggcccagcccaccctgtcctatccttcctcagaccctcttgggacctagtctctgccttctactctctacccctggcccccctcagccctacaagtgtccctatatcccctgtcagtgtggggaggggcccggaccctgatgctcatgtggctgttgacctgtcccggtatgaaggctgagacggccccttccccacccacccccacctcctcagtgtgctatg

SEQ ID NO: 308 - DNA, 1316 bp, Homo sapiens
  Herstatin variant
  allele 1079: n= T or A
gcagtgagcaccatggagctggcggccttgtgccgctgggggctcctcctcgccctcttgccccccggagccgcgagcacccaagtgtgcaccggcacagacatgaagctgcggctccctgccagtcccgagacccacctggacatgctccgccacctctaccagggatgccaggtggtgcagggaaacctggaactcacctacctgcccaccaatgccagcctgtccttcctgcaggatatccaggaggtgcagggctacgtgctcatcgctcacaaccaagtgaggcaggtcccactgcagaggctgcggattgtgcgaggcacccagctctttgaggacaactatgccctggccgtgctagacaatggagacccgctgaacaataccacccctgtcacaggggcctccccaggaggcctgcgggagctgcagcttcgaagcctcacagagatcttgaaaggaggggtcttgatccagcggaacccccagctctgctaccaggacacgattttgtggaaggacatcttccacaagaacaaccagctggctctcacactgatagacaccaaccgctctcgggcctgccacccctgctctccgatgtgtaagggctcccgctgctggggagagagttctgaggattgtcagagcctgacgcgcactgtctgtgccggtggctgtgcccgctgcaaggggccactgcccactgactgctgccatgagcagtgtgctgccggctgcacgggccccaagcactctgactgcctggcctgcctccacttcaaccacagtggcatctgtgagctgcactgcccagccctggtcacctacaacacagacacgtttgagtccatgcccaatcccgagggccggtatacattcggcgccagctgtgtcactgcctgtccctacaactacctttctacggacgtgggatcctgcaccctcgtctgccccctgcacaaccaagaggtgacagcagaggatggaacacagcggtgtgagaagtgcagcaagccctgtgcccgaggtacccactcactgcccccgaggccagctgcagttcctgtccctcngcgcatgcagcctggcccagcccaccctgtcctatccttcctcagaccctcttgggacctagtctctgccttctactctctacccctggcccccctcagccctacaagtgtccctatatcccctgtcagtgtggggaggggcccggaccctgatgctcatgtggctgttgacctgtcccggtatgaaggctgagacggccccttccccacccacccccacctcctcagtgtgctatg

SEQ ID NO: 309 - DNA, 1316 bp, Homo sapiens
  Herstatin variant
  allele 1081: n= C or T
gcagtgagcaccatggagctggcggccttgtgccgctgggggctcctcctcgccctcttgccccccggagccgcgagcacccaagtgtgcaccggcacagacatgaagctgcggctccctgccagtcccgagacccacctggacatgctccgccacctctaccagggatgccaggtggtgcagggaaacctggaactcacctacctgcccaccaatgccagcctgtccttcctgcaggatatccaggaggtgcagggctacgtgctcatcgctcacaaccaagtgaggcaggtcccactgcagaggctgcggattgtgcgaggcacccagctctttgaggacaactatgccctggccgtgctagacaatggagacccgctgaacaataccacccctgtcacaggggcctccccaggaggcctgcgggagctgcagcttcgaagcctcacagagatcttgaaaggaggggtcttgatccagcggaacccccagctctgctaccaggacacgattttgtggaaggacatcttccacaagaacaaccagctggctctcacactgatagacaccaaccgctctcgggcctgccacccctgctctccgatgtgtaagggctcccgctgctggggagagagttctgaggattgtcagagcctgacgcgcactgtctgtgccggtggctgtgcccgctgcaaggggccactgcccactgactgctgccatgagcagtgtgctgccggctgcacgggccccaagcactctgactgcctggcctgcctccacttcaaccacagtggcatctgtgagctgcactgcccagccctggtcacctacaacacagacacgtttgagtccatgcccaatcccgagggccggtatacattcggcgccagctgtgtcactgcctgtccctacaactacctttctacggacgtgggatcctgcaccctcgtctgccccctgcacaaccaagaggtgacagcagaggatggaacacagcggtgtgagaagtgcagcaagccctgtgcccgaggtacccactcactgcccccgaggccagctgcagttcctgtccctctgngcatgcagcctggcccagcccaccctgtcctatccttcctcagaccctcttgggacctagtctctgccttctactctctacccctggcccccctcagccctacaagtgtccctatatcccctgtcagtgtggggaggggcccggaccctgatgctcatgtggctgttgacctgtcccggtatgaaggctgagacggccccttccccacccacccccacctcctcagtgtgctatg

SEQ ID NO: 310 - DNA, 1316 bp, Homo sapiens
  Herstatin variant
  allele 1084: n= A or C
gcagtgagcaccatggagctggcggccttgtgccgctgggggctcctcctcgccctcttgccccccggagccgcgagcacccaagtgtgcaccggcacagacatgaagctgcggctccctgccagtcccgagacccacctggacatgctccgccacctctaccagggatgccaggtggtgcagggaaacctggaactcacctacctgcccaccaatgccagcctgtccttcctgcaggatatccaggaggtgcagggctacgtgctcatcgctcacaaccaagtgaggcaggtcccactgcagaggctgcggattgtgcgaggcacccagctctttgaggacaactatgccctggccgtgctagacaatggagacccgctgaacaataccacccctgtcacaggggcctccccaggaggcctgcgggagctgcagcttcgaagcctcacagagatcttgaaaggaggggtcttgatccagcggaacccccagctctgctaccaggacacgattttgtggaaggacatcttccacaagaacaaccagctggctctcacactgatagacaccaaccgctctcgggcctgccacccctgctctccgatgtgtaagggctcccgctgctggggagagagttctgaggattgtcagagcctgacgcgcactgtctgtgccggtggctgtgcccgctgcaaggggccactgcccactgactgctgccatgagcagtgtgctgccggctgcacgggccccaagcactctgactgcctggcctgcctccacttcaaccacagtggcatctgtgagctgcactgcccagccctggtcacctacaacacagacacgtttgagtccatgcccaatcccgagggccggtatacattcggcgccagctgtgtcactgcctgtccctacaactacctttctacggacgtgggatcctgcaccctcgtctgccccctgcacaaccaagaggtgacagcagaggatggaacacagcggtgtgagaagtgcagcaagccctgtgcccgaggtacccactcactgcccccgaggccagctgcagttcctgtccctctgcgcntgcagcctggcccagcccaccctgtcctatccttcctcagaccctcttgggacctagtctctgccttctactctctacccctggcccccctcagccctacaagtgtccctatatcccctgtcagtgtggggaggggcccggaccctgatgctcatgtggctgttgacctgtcccggtatgaaggctgagacggccccttccccacccacccccacctcctcagtgtgctatg

SEQ ID NO: 311 - DNA, 1316 bp, Homo sapiens
  Herstatin variant
  allele 1086: n= G or A
gcagtgagcaccatggagctggcggccttgtgccgctgggggctcctcctcgccctcttgccccccggagccgcgagcacccaagtgtgcaccggcacagacatgaagctgcggctccctgccagtcccgagacccacctggacatgctccgccacctctaccagggatgccaggtggtgcagggaaacctggaactcacctacctgcccaccaatgccagcctgtccttcctgcaggatatccaggaggtgcagggctacgtgctcatcgctcacaaccaagtgaggcaggtcccactgcagaggctgcggattgtgcgaggcacccagctctttgaggacaactatgccctggccgtgctagacaatggagacccgctgaacaataccacccctgtcacaggggcctccccaggaggcctgcgggagctgcagcttcgaagcctcacagagatcttgaaaggaggggtcttgatccagcggaacccccagctctgctaccaggacacgattttgtggaaggacatcttccacaagaacaaccagctggctctcacactgatagacaccaaccgctctcgggcctgccacccctgctctccgatgtgtaagggctcccgctgctggggagagagttctgaggattgtcagagcctgacgcgcactgtctgtgccggtggctgtgcccgctgcaaggggccactgcccactgactgctgccatgagcagtgtgctgccggctgcacgggccccaagcactctgactgcctggcctgcctccacttcaaccacagtggcatctgtgagctgcactgcccagccctggtcacctacaacacagacacgtttgagtccatgcccaatcccgagggccggtatacattcggcgccagctgtgtcactgcctgtccctacaactacctttctacggacgtgggatcctgcaccctcgtctgccccctgcacaaccaagaggtgacagcagaggatggaacacagcggtgtgagaagtgcagcaagccctgtgcccgaggtacccactcactgcccccgaggccagctgcagttcctgtccctctgcgcatncagcctggcccagcccaccctgtcctatccttcctcagaccctcttgggacctagtctctgccttctactctctacccctggcccccctcagccctacaagtgtccctatatcccctgtcagtgtggggaggggcccggaccctgatgctcatgtggctgttgacctgtcccggtatgaaggctgagacggccccttccccacccacccccacctcctcagtgtgctatg

SEQ ID NO: 312 - DNA, 1316 bp, Homo sapiens
  Herstatin variant
  allele 1094: n= G, C, T, or A
gcagtgagcaccatggagctggcggccttgtgccgctgggggctcctcctcgccctcttgccccccggagccgcgagcacccaagtgtgcaccggcacagacatgaagctgcggctccctgccagtcccgagacccacctggacatgctccgccacctctaccagggatgccaggtggtgcagggaaacctggaactcacctacctgcccaccaatgccagcctgtccttcctgcaggatatccaggaggtgcagggctacgtgctcatcgctcacaaccaagtgaggcaggtcccactgcagaggctgcggattgtgcgaggcacccagctctttgaggacaactatgccctggccgtgctagacaatggagacccgctgaacaataccacccctgtcacaggggcctccccaggaggcctgcgggagctgcagcttcgaagcctcacagagatcttgaaaggaggggtcttgatccagcggaacccccagctctgctaccaggacacgattttgtggaaggacatcttccacaagaacaaccagctggctctcacactgatagacaccaaccgctctcgggcctgccacccctgctctccgatgtgtaagggctcccgctgctggggagagagttctgaggattgtcagagcctgacgcgcactgtctgtgccggtggctgtgcccgctgcaaggggccactgcccactgactgctgccatgagcagtgtgctgccggctgcacgggccccaagcactctgactgcctggcctgcctccacttcaaccacagtggcatctgtgagctgcactgcccagccctggtcacctacaacacagacacgtttgagtccatgcccaatcccgagggccggtatacattcggcgccagctgtgtcactgcctgtccctacaactacctttctacggacgtgggatcctgcaccctcgtctgccccctgcacaaccaagaggtgacagcagaggatggaacacagcggtgtgagaagtgcagcaagccctgtgcccgaggtacccactcactgcccccgaggccagctgcagttcctgtccctctgcgcatgcagcctgncccagcccaccctgtcctatccttcctcagaccctcttgggacctagtctctgccttctactctctacccctggcccccctcagccctacaagtgtccctatatcccctgtcagtgtggggaggggcccggaccctgatgctcatgtggctgttgacctgtcccggtatgaaggctgagacggccccttccccacccacccccacctcctcagtgtgctatg

SEQ ID NO: 313 - DNA, 1316 bp, Homo sapiens
  Herstatin variant
  allele 1124: n= G or T
gcagtgagcaccatggagctggcggccttgtgccgctgggggctcctcctcgccctcttgccccccggagccgcgagcacccaagtgtgcaccggcacagacatgaagctgcggctccctgccagtcccgagacccacctggacatgctccgccacctctaccagggatgccaggtggtgcagggaaacctggaactcacctacctgcccaccaatgccagcctgtccttcctgcaggatatccaggaggtgcagggctacgtgctcatcgctcacaaccaagtgaggcaggtcccactgcagaggctgcggattgtgcgaggcacccagctctttgaggacaactatgccctggccgtgctagacaatggagacccgctgaacaataccacccctgtcacaggggcctccccaggaggcctgcgggagctgcagcttcgaagcctcacagagatcttgaaaggaggggtcttgatccagcggaacccccagctctgctaccaggacacgattttgtggaaggacatcttccacaagaacaaccagctggctctcacactgatagacaccaaccgctctcgggcctgccacccctgctctccgatgtgtaagggctcccgctgctggggagagagttctgaggattgtcagagcctgacgcgcactgtctgtgccggtggctgtgcccgctgcaaggggccactgcccactgactgctgccatgagcagtgtgctgccggctgcacgggccccaagcactctgactgcctggcctgcctccacttcaaccacagtggcatctgtgagctgcactgcccagccctggtcacctacaacacagacacgtttgagtccatgcccaatcccgagggccggtatacattcggcgccagctgtgtcactgcctgtccctacaactacctttctacggacgtgggatcctgcaccctcgtctgccccctgcacaaccaagaggtgacagcagaggatggaacacagcggtgtgagaagtgcagcaagccctgtgcccgaggtacccactcactgcccccgaggccagctgcagttcctgtccctctgcgcatgcagcctggcccagcccaccctgtcctatccttcctcanaccctcttgggacctagtctctgccttctactctctacccctggcccccctcagccctacaagtgtccctatatcccctgtcagtgtggggaggggcccggaccctgatgctcatgtggctgttgacctgtcccggtatgaaggctgagacggccccttccccacccacccccacctcctcagtgtgctatg

SEQ ID NO: 314 - DNA, 1316 bp, Homo sapiens
  Herstatin variant
  allele 1138: n= C or A
gcagtgagcaccatggagctggcggccttgtgccgctgggggctcctcctcgccctcttgccccccggagccgcgagcacccaagtgtgcaccggcacagacatgaagctgcggctccctgccagtcccgagacccacctggacatgctccgccacctctaccagggatgccaggtggtgcagggaaacctggaactcacctacctgcccaccaatgccagcctgtccttcctgcaggatatccaggaggtgcagggctacgtgctcatcgctcacaaccaagtgaggcaggtcccactgcagaggctgcggattgtgcgaggcacccagctctttgaggacaactatgccctggccgtgctagacaatggagacccgctgaacaataccacccctgtcacaggggcctccccaggaggcctgcgggagctgcagcttcgaagcctcacagagatcttgaaaggaggggtcttgatccagcggaacccccagctctgctaccaggacacgattttgtggaaggacatcttccacaagaacaaccagctggctctcacactgatagacaccaaccgctctcgggcctgccacccctgctctccgatgtgtaagggctcccgctgctggggagagagttctgaggattgtcagagcctgacgcgcactgtctgtgccggtggctgtgcccgctgcaaggggccactgcccactgactgctgccatgagcagtgtgctgccggctgcacgggccccaagcactctgactgcctggcctgcctccacttcaaccacagtggcatctgtgagctgcactgcccagccctggtcacctacaacacagacacgtttgagtccatgcccaatcccgagggccggtatacattcggcgccagctgtgtcactgcctgtccctacaactacctttctacggacgtgggatcctgcaccctcgtctgccccctgcacaaccaagaggtgacagcagaggatggaacacagcggtgtgagaagtgcagcaagccctgtgcccgaggtacccactcactgcccccgaggccagctgcagttcctgtccctctgcgcatgcagcctggcccagcccaccctgtcctatccttcctcagaccctcttgggacntagtctctgccttctactctctacccctggcccccctcagccctacaagtgtccctatatcccctgtcagtgtggggaggggcccggaccctgatgctcatgtggctgttgacctgtcccggtatgaaggctgagacggccccttccccacccacccccacctcctcagtgtgctatg

SEQ ID NO: 315 - DNA, 1316 bp, Homo sapiens
  Herstatin variant
  allele 1193: n= C or G
gcagtgagcaccatggagctggcggccttgtgccgctgggggctcctcctcgccctcttgccccccggagccgcgagcacccaagtgtgcaccggcacagacatgaagctgcggctccctgccagtcccgagacccacctggacatgctccgccacctctaccagggatgccaggtggtgcagggaaacctggaactcacctacctgcccaccaatgccagcctgtccttcctgcaggatatccaggaggtgcagggctacgtgctcatcgctcacaaccaagtgaggcaggtcccactgcagaggctgcggattgtgcgaggcacccagctctttgaggacaactatgccctggccgtgctagacaatggagacccgctgaacaataccacccctgtcacaggggcctccccaggaggcctgcgggagctgcagcttcgaagcctcacagagatcttgaaaggaggggtcttgatccagcggaacccccagctctgctaccaggacacgattttgtggaaggacatcttccacaagaacaaccagctggctctcacactgatagacaccaaccgctctcgggcctgccacccctgctctccgatgtgtaagggctcccgctgctggggagagagttctgaggattgtcagagcctgacgcgcactgtctgtgccggtggctgtgcccgctgcaaggggccactgcccactgactgctgccatgagcagtgtgctgccggctgcacgggccccaagcactctgactgcctggcctgcctccacttcaaccacagtggcatctgtgagctgcactgcccagccctggtcacctacaacacagacacgtttgagtccatgcccaatcccgagggccggtatacattcggcgccagctgtgtcactgcctgtccctacaactacctttctacggacgtgggatcctgcaccctcgtctgccccctgcacaaccaagaggtgacagcagaggatggaacacagcggtgtgagaagtgcagcaagccctgtgcccgaggtacccactcactgcccccgaggccagctgcagttcctgtccctctgcgcatgcagcctggcccagcccaccctgtcctatccttcctcagaccctcttgggacctagtctctgccttctactctctacccctggcccccctcagccctacaagtgtccntatatcccctgtcagtgtggggaggggcccggaccctgatgctcatgtggctgttgacctgtcccggtatgaaggctgagacggccccttccccacccacccccacctcctcagtgtgctatg

SEQ ID NO: 316 - DNA, 1316 bp, Homo sapiens
  Herstatin variant
  allele 1223: n= C or T
gcagtgagcaccatggagctggcggccttgtgccgctgggggctcctcctcgccctcttgccccccggagccgcgagcacccaagtgtgcaccggcacagacatgaagctgcggctccctgccagtcccgagacccacctggacatgctccgccacctctaccagggatgccaggtggtgcagggaaacctggaactcacctacctgcccaccaatgccagcctgtccttcctgcaggatatccaggaggtgcagggctacgtgctcatcgctcacaaccaagtgaggcaggtcccactgcagaggctgcggattgtgcgaggcacccagctctttgaggacaactatgccctggccgtgctagacaatggagacccgctgaacaataccacccctgtcacaggggcctccccaggaggcctgcgggagctgcagcttcgaagcctcacagagatcttgaaaggaggggtcttgatccagcggaacccccagctctgctaccaggacacgattttgtggaaggacatcttccacaagaacaaccagctggctctcacactgatagacaccaaccgctctcgggcctgccacccctgctctccgatgtgtaagggctcccgctgctggggagagagttctgaggattgtcagagcctgacgcgcactgtctgtgccggtggctgtgcccgctgcaaggggccactgcccactgactgctgccatgagcagtgtgctgccggctgcacgggccccaagcactctgactgcctggcctgcctccacttcaaccacagtggcatctgtgagctgcactgcccagccctggtcacctacaacacagacacgtttgagtccatgcccaatcccgagggccggtatacattcggcgccagctgtgtcactgcctgtccctacaactacctttctacggacgtgggatcctgcaccctcgtctgccccctgcacaaccaagaggtgacagcagaggatggaacacagcggtgtgagaagtgcagcaagccctgtgcccgaggtacccactcactgcccccgaggccagctgcagttcctgtccctctgcgcatgcagcctggcccagcccaccctgtcctatccttcctcagaccctcttgggacctagtctctgccttctactctctacccctggcccccctcagccctacaagtgtccctatatcccctgtcagtgtggggaggggccnggaccctgatgctcatgtggctgttgacctgtcccggtatgaaggctgagacggccccttccccacccacccccacctcctcagtgtgctatg

SEQ ID NO: 317 - DNA, 1316 bp, Homo sapiens
  Herstatin variant
  allele 1249: n= G, C, or A
gcagtgagcaccatggagctggcggccttgtgccgctgggggctcctcctcgccctcttgccccccggagccgcgagcacccaagtgtgcaccggcacagacatgaagctgcggctccctgccagtcccgagacccacctggacatgctccgccacctctaccagggatgccaggtggtgcagggaaacctggaactcacctacctgcccaccaatgccagcctgtccttcctgcaggatatccaggaggtgcagggctacgtgctcatcgctcacaaccaagtgaggcaggtcccactgcagaggctgcggattgtgcgaggcacccagctctttgaggacaactatgccctggccgtgctagacaatggagacccgctgaacaataccacccctgtcacaggggcctccccaggaggcctgcgggagctgcagcttcgaagcctcacagagatcttgaaaggaggggtcttgatccagcggaacccccagctctgctaccaggacacgattttgtggaaggacatcttccacaagaacaaccagctggctctcacactgatagacaccaaccgctctcgggcctgccacccctgctctccgatgtgtaagggctcccgctgctggggagagagttctgaggattgtcagagcctgacgcgcactgtctgtgccggtggctgtgcccgctgcaaggggccactgcccactgactgctgccatgagcagtgtgctgccggctgcacgggccccaagcactctgactgcctggcctgcctccacttcaaccacagtggcatctgtgagctgcactgcccagccctggtcacctacaacacagacacgtttgagtccatgcccaatcccgagggccggtatacattcggcgccagctgtgtcactgcctgtccctacaactacctttctacggacgtgggatcctgcaccctcgtctgccccctgcacaaccaagaggtgacagcagaggatggaacacagcggtgtgagaagtgcagcaagccctgtgcccgaggtacccactcactgcccccgaggccagctgcagttcctgtccctctgcgcatgcagcctggcccagcccaccctgtcctatccttcctcagaccctcttgggacctagtctctgccttctactctctacccctggcccccctcagccctacaagtgtccctatatcccctgtcagtgtggggaggggcccggaccctgatgctcatgtggctgttnacctgtcccggtatgaaggctgagacggccccttccccacccacccccacctcctcagtgtgctatg

SEQ ID NO: 318 - DNA, 1316 bp, Homo sapiens
  Herstatin variant
  allele 1049: n= C or T
  allele 1249: n= G, C, or A
gcagtgagcaccatggagctggcggccttgtgccgctgggggctcctcctcgccctcttgccccccggagccgcgagcacccaagtgtgcaccggcacagacatgaagctgcggctccctgccagtcccgagacccacctggacatgctccgccacctctaccagggatgccaggtggtgcagggaaacctggaactcacctacctgcccaccaatgccagcctgtccttcctgcaggatatccaggaggtgcagggctacgtgctcatcgctcacaaccaagtgaggcaggtcccactgcagaggctgcggattgtgcgaggcacccagctctttgaggacaactatgccctggccgtgctagacaatggagacccgctgaacaataccacccctgtcacaggggcctccccaggaggcctgcgggagctgcagcttcgaagcctcacagagatcttgaaaggaggggtcttgatccagcggaacccccagctctgctaccaggacacgattttgtggaaggacatcttccacaagaacaaccagctggctctcacactgatagacaccaaccgctctcgggcctgccacccctgctctccgatgtgtaagggctcccgctgctggggagagagttctgaggattgtcagagcctgacgcgcactgtctgtgccggtggctgtgcccgctgcaaggggccactgcccactgactgctgccatgagcagtgtgctgccggctgcacgggccccaagcactctgactgcctggcctgcctccacttcaaccacagtggcatctgtgagctgcactgcccagccctggtcacctacaacacagacacgtttgagtccatgcccaatcccgagggccggtatacattcggcgccagctgtgtcactgcctgtccctacaactacctttctacggacgtgggatcctgcaccctcgtctgccccctgcacaaccaagaggtgacagcagaggatggaacacagcggtgtgagaagtgcagcaagccctgtgcccgaggtacccactcactgcncccgaggccagctgcagttcctgtccctctgcgcatgcagcctggcccagcccaccctgtcctatccttcctcagaccctcttgggacctagtctctgccttctactctctacccctggcccccctcagccctacaagtgtccctatatcccctgtcagtgtggggaggggcccggaccctgatgctcatgtggctgttnacctgtcccggtatgaaggctgagacggccccttccccacccacccccacctcctcagtgtgctatg

SEQ ID NO: 319 - protein, 79 aa, Homo sapiens
  Intron 8
GTHSLPPRPAAVPVPLRMQPGPAHPVLSFLRPSWDLVSAFYSLPLAPLSPTSVPISPVSVGRGPDPDAHVAVDLSRYEG

SEQ ID NO: 320 - protein, 79 aa, Homo sapiens
  Intron 8 variant
  VARIANT 2: Xaa= Thr or Ser
GXHSLPPRPAAVPVPLRMQPGPAHPVLSFLRPSWDLVSAFYSLPLAPLSPTSVPISPVSVGRGPDPDAHVAVDLSRYEG

SEQ ID NO: 321 - protein, 79 aa, Homo sapiens
  Intron 8 variant
  VARIANT 5: Xaa= Leu or Pro
GTHSXPPRPAAVPVPLRMQPGPAHPVLSFLRPSWDLVSAFYSLPLAPLSPTSVPISPVSVGRGPDPDAHVAVDLSRYEG

SEQ ID NO: 322 - protein, 79 aa, Homo sapiens
  Intron 8 variant
  VARIANT 6: Xaa= Pro or Leu
GTHSLXPRPAAVPVPLRMQPGPAHPVLSFLRPSWDLVSAFYSLPLAPLSPTSVPISPVSVGRGPDPDAHVAVDLSRYEG

SEQ ID NO: 323 - protein, 79 aa, Homo sapiens
  Intron 8 variant
  VARIANT 16: Xaa= Leu or Gln
GTHSLPPRPAAVPVPXRMQPGPAHPVLSFLRPSWDLVSAFYSLPLAPLSPTSVPISPVSVGRGPDPDAHVAVDLSRYEG

SEQ ID NO: 324 - protein, 79 aa, Homo sapiens
  Intron 8 variant
  VARIANT 17: Xaa= Arg or Cys
GTHSLPPRPAAVPVPLXMQPGPAHPVLSFLRPSWDLVSAFYSLPLAPLSPTSVPISPVSVGRGPDPDAHVAVDLSRYEG

SEQ ID NO: 325 - protein, 79 aa, Homo sapiens
  Intron 8 variant
  VARIANT 18: Xaa= Met or Leu
GTHSLPPRPAAVPVPLRXQPGPAHPVLSFLRPSWDLVSAFYSLPLAPLSPTSVPISPVSVGRGPDPDAHVAVDLSRYEG

SEQ ID NO: 326 - protein, 79 aa, Homo sapiens; identical to SEQ ID NO: 325
  Intron 8 variant
  VARIANT 18: Xaa= Met or Ile

SEQ ID NO: 327 - protein, 79 aa, Homo sapiens
  Intron 8 variant
  VARIANT 21: Xaa= Gly, Asp, Ala, or Val
GTHSLPPRPAAVPVPLRMQPXPAHPVLSFLRPSWDLVSAFYSLPLAPLSPTSVPISPVSVGRGPDPDAHVAVDLSRYEG

SEQ ID NO: 328 - protein, 79 aa, Homo sapiens
  Intron 8 variant
  VARIANT 31: Xaa= Arg or Ile
GTHSLPPRPAAVPVPLRMQPGPAHPVLSFLXPSWDLVSAFYSLPLAPLSPTSVPISPVSVGRGPDPDAHVAVDLSRYEG

SEQ ID NO: 329 - protein, 79 aa, Homo sapiens
  Intron 8 variant
  VARIANT 36: Xaa= Leu or Ile
GTHSLPPRPAAVPVPLRMQPGPAHPVLSFLRPSWDXVSAFYSLPLAPLSPTSVPISPVSVGRGPDPDAHVAVDLSRYEG

SEQ ID NO: 330 - protein, 79 aa, Homo sapiens
  Intron 8 variant
  VARIANT 54: Xaa= Pro or Arg
GTHSLPPRPAAVPVPLRMQPGPAHPVLSFLRPSWDLVSAFYSLPLAPLSPTSVXISPVSVGRGPDPDAHVAVDLSRYEG

SEQ ID NO: 331 - protein, 79 aa, Homo sapiens
  Intron 8 variant
  VARIANT 64: Xaa= Pro or Leu
GTHSLPPRPAAVPVPLRMQPGPAHPVLSFLRPSWDLVSAFYSLPLAPLSPTSVPISPVSVGRGXDPDAHVAVDLSRYEG

SEQ ID NO: 332 - protein, 79 aa, Homo sapiens
  Intron 8 variant
  VARIANT 73: Xaa= Asp, His, or Asn
GTHSLPPRPAAVPVPLRMQPGPAHPVLSFLRPSWDLVSAFYSLPLAPLSPTSVPISPVSVGRGPDPDAHVAVXLSRYEG

SEQ ID NO: 333 - protein, 79 aa, Homo sapiens
  Intron 8 variant
  VARIANT 6: Xaa= Pro or Leu
  VARIANT 73: Xaa= Asp, His or Asn
GTHSLXPRPAAVPVPLRMQPGPAHPVLSFLRPSWDLVSAFYSLPLAPLSPTSVPISPVSVGRGPDPDAHVAVXLSRYEG

SEQ ID NO: 334 - DNA, 240 bp, Homo sapiens
  Intron 8
ggtacccactcactgcccccgaggccagctgcagttcctgtccctctgcgcatgcagcctggcccagcccaccctgtcctatccttcctcagaccctcttgggacctagtctctgccttctactctctacccctggcccccctcagccctacaagtgtccctatatcccctgtcagtgtggggaggggcccggaccctgatgctcatgtggctgttgacctgtcccggtatgaaggctga

SEQ ID NO: 335 - DNA, 240 bp, Homo sapiens
  Intron 8 variant
  allele 4: n= A or T
ggtncccactcactgcccccgaggccagctgcagttcctgtccctctgcgcatgcagcctggcccagcccaccctgtcctatccttcctcagaccctcttgggacctagtctctgccttctactctctacccctggcccccctcagccctacaagtgtccctatatcccctgtcagtgtggggaggggcccggaccctgatgctcatgtggctgttgacctgtcccggtatgaaggctga

SEQ ID NO: 336 - DNA, 240 bp, Homo sapiens
  Intron 8 variant
  allele 14: n= T or C
ggtacccactcacngcccccgaggccagctgcagttcctgtccctctgcgcatgcagcctggcccagcccaccctgtcctatccttcctcagaccctcttgggacctagtctctgccttctactctctacccctggcccccctcagccctacaagtgtccctatatcccctgtcagtgtggggaggggcccggaccctgatgctcatgtggctgttgacctgtcccggtatgaaggctga

SEQ ID NO: 337 - DNA, 240 bp, Homo sapiens
  Intron 8 variant
  allele 17: n= C or T
ggtacccactcactgcncccgaggccagctgcagttcctgtccctctgcgcatgcagcctggcccagcccaccctgtcctatccttcctcagaccctcttgggacctagtctctgccttctactctctacccctggcccccctcagccctacaagtgtccctatatcccctgtcagtgtggggaggggcccggaccctgatgctcatgtggctgttgacctgtcccggtatgaaggctga

SEQ ID NO: 338 - DNA, 240 bp, Homo sapiens
  Intron 8 variant
  allele 47: n= T or A
ggtacccactcactgcccccgaggccagctgcagttcctgtccctcngcgcatgcagcctggcccagcccaccctgtcctatccttcctcagaccctcttgggacctagtctctgccttctactctctacccctggcccccctcagccctacaagtgtccctatatcccctgtcagtgtggggaggggcccggaccctgatgctcatgtggctgttgacctgtcccggtatgaaggctga

SEQ ID NO: 339 - DNA, 240 bp, Homo sapiens
  Intron 8 variant
  allele 49: n= C or T
ggtacccactcactgcccccgaggccagctgcagttcctgtccctctgngcatgcagcctggcccagcccaccctgtcctatccttcctcagaccctcttgggacctagtctctgccttctactctctacccctggcccccctcagccctacaagtgtccctatatcccctgtcagtgtggggaggggcccggaccctgatgctcatgtggctgttnacctgtcccggtatgaaggctga

SEQ ID NO: 340 - DNA, 240 bp, Homo sapiens
  Intron 8 variant
  allele 52: n= A or C
ggtacccactcactgcccccgaggccagctgcagttcctgtccctctgcgcntgcagcctggcccagcccaccctgtcctatccttcctcagaccctcttgggacctagtctctgccttctactctctacccctggcccccctcagccctacaagtgtccctatatcccctgtcagtgtggggaggggcccggaccctgatgctcatgtggctgttgacctgtcccggtatgaaggctga

SEQ ID NO: 341 - DNA, 240 bp, Homo sapiens
  Intron 8 variant
  allele 54: n= G or A
ggtacccactcactgcccccgaggccagctgcagttcctgtccctctgcgcatncagcctggcccagcccaccctgtcctatccttcctcagaccctcttgggacctagtctctgccttctactctctacccctggcccccctcagccctacaagtgtccctatatcccctgtcagtgtggggaggggcccggaccctgatgctcatgtggctgttgacctgtcccggtatgaaggctga

SEQ ID NO: 342 - DNA, 240 bp, Homo sapiens
  Intron 8 variant
  allele 62: n= G, C, T, or A
ggtacccactcactgcccccgaggccagctgcagttcctgtccctctgcgcatgcagcctgncccagcccaccctgtcctatccttcctcagaccctcttgggacctagtctctgccttctactctctacccctggcccccctcagccctacaagtgtccctatatcccctgtcagtgtggggaggggcccggaccctgatgctcatgtggctgttgacctgtcccggtatgaaggctga

SEQ ID NO: 343 - DNA, 240 bp, Homo sapiens
  Intron 8 variant
  allele 92: n= G or T
ggtacccactcactgcccccgaggccagctgcagttcctgtccctctgcgcatgcagcctggcccagcccaccctgtcctatccttcctcanaccctcttgggacctagtctctgccttctactctctacccctggcccccctcagccctacaagtgtccctatatcccctgtcagtgtggggaggggcccggaccctgatgctcatgtggctgttnacctgtcccggtatgaaggctga

SEQ ID NO: 344 - DNA, 240 bp, Homo sapiens
  Intron 8 variant
  allele 106: n= C or A
ggtacccactcactgcccccgaggccagctgcagttcctgtccctctgcgcatgcagcctggcccagcccaccctgtcctatccttcctcagaccctcttgggacntagtctctgccttctactctctacccctggcccccctcagccctacaagtgtccctatatcccctgtcagtgtggggaggggcccggaccctgatgctcatgtggctgttgacctgtcccggtatgaaggctga

SEQ ID NO: 345 - DNA, 240 bp, Homo sapiens
  Intron 8 variant
  allele 161: n= C or G
ggtacccactcactgcccccgaggccagctgcagttcctgtccctctgcgcatgcagcctggcccagcccaccctgtcctatccttcctcagaccctcttgggacctagtctctgccttctactctctacccctggcccccctcagccctacaagtgtccntatatcccctgtcagtgtggggaggggcccggaccctgatgctcatgtggctgttgacctgtcccggtatgaaggctga

SEQ ID NO: 346 - DNA, 240 bp, Homo sapiens
  Intron 8 variant
  allele 191: n= C or T
ggtacccactcactgcccccgaggccagctgcagttcctgtccctctgcgcatgcagcctggcccagcccaccctgtcctatccttcctcagaccctcttgggacctagtctctgccttctactctctacccctggcccccctcagccctacaagtgtccctatatcccctgtcagtgtggggaggggccnggaccctgatgctcatgtggctgttgacctgtcccggtatgaaggctga

SEQ ID NO: 347 - DNA, 240 bp, Homo sapiens
  Intron 8 variant
  allele 217: n= G, C, or A
ggtacccactcactgcccccgaggccagctgcagttcctgtccctctgcgcatgcagcctggcccagcccaccctgtcctatccttcctcagaccctcttgggacctagtctctgccttctactctctacccctggcccccctcagccctacaagtgtccctatatcccctgtcagtgtggggaggggcccggaccctgatgctcatgtggctgttnacctgtcccggtatgaaggctga

SEQ ID NO: 348 - DNA, 240 bp, Homo sapiens
  Intron 8 variant
  allele 17: n= C or T
  allele 217: n= G, C, or A
ggtacccactcactgcncccgaggccagctgcagttcctgtccctctgcgcatgcagcctggcccagcccaccctgtcctatccttcctcagaccctcttgggacctagtctctgccttctactctctacccctggcccccctcagccctacaagtgtccctatatcccctgtcagtgtggggaggggcccggaccctgatgctcatgtggctgttnacctgtcccggtatgaaggctga

SEQ ID NO: 349 - DNA, 1471 bp, Homo sapiens
  SR023A02
cccaggcatctcctccagagggatccgccagcccgtccagcagcaccatgtgggtgaccaaactcctgccagccctgctgctgcagcatgtcctcctgcatctcctcctgctccccatcgccatcccctatgcagagggacaaaggaaaagaagaaatacaattcatgaattcaaaaaatcagcaaagactaccctaatcaaaatagatccagcactgaagataaaaaccaaaaaagtgaatactgcagaccaatgtgctaatagatgtactaggaataaaggacttccactcacttgcaaggcttttgtttttgataaagcaagaaaacaatgcctctggttccccttcaatagcatgtcaagtggagtgaaaaaagaatttggccatgaatttgacctctatgaaaacaaagactacattagaaactgcatcattggtaaaggacgcagctacaagggaacagtatctatcactaagagtggcatcaaatgtcagccctggagttccatgataccacacgaacacagctatcggggtaaagacctacaggaaaactactgtcgaaatcctcgaggggaagaagggggaccctggtgtttcacaagcaatccagaggtacgctacgaagtctgtgacattcctcagtgttcagaagttgaatgcatgacctgcaatggggagagttatcgaggtctcatggatcatacagaatcaggcaagatttgtcagcgctgggatcatcagacaccacaccggcacaaattcttgcctgaaagatatcccgacaagggctttgatgataattattgccgcaatcccgatggccagccgaggccatggtgctatactcttgaccctcacacccgctgggagtactgtgcaattaaaacatgcgctgacaatactatgaatgacactgatgttcctttggaaacaactgaatgcatccaaggtcaaggagaaggctacaggggcactgtcaataccatttggaatggaatttcatgtcagcgttgggattctcagtatcctcacgagcatgacatgactcctgaaaatttcaagtgcaaggacctacgagaaaattactgccgaaatccagatgggtctgaatcaccctggtgttttaccactgatccaaacatccgagttggctactgctcccaaattccaaactgtgatatgtcacatggacaagattgttatcgtgggaatggcaaaaattatatgggcaacttatcccaaacaagatctggactaacatgttcaatgtgggacaagaacatggaagacttacatcgtcatatcttctgggaaccagatgcaagtaagctgaatgagaattactgccgaaatccagatgatgatgctcatggaccctggtgctacacgggaaatccactcattccttgggattattgccctatttctcgttgtaagtacagttagggattggtgtcttgtgaaat

SEQ ID NO: 350 - protein, 467 aa, Homo sapiens
  SR023A02
MWVTKLLPALLLQHVLLHLLLLPIAIPYAEGQRKRRNTIHEFKKSAKTTLIKIDPALKIKTKKVNTADQCANRCTRNKGLPLTCKAFVFDKARKQCLWFPFNSMSSGVKKEFGHEFDLYENKDYIRNCIIGKGRSYKGTVSITKSGIKCQPWSSMIPHEHSYRGKDLQENYCRNPRGEEGGPWCFTSNPEVRYEVCDIPQCSEVECMTCNGESYRGLMDHTESGKICQRWDHQTPHRHKFLPERYPDKGFDDNYCRNPDGQPRPWCYTLDPHTRWEYCAIKTCADNTMNDTDVPLETTECIQGQGEGYRGTVNTIWNGISCQRWDSQYPHEHDMTPENFKCKDLRENYCRNPDGSESPWCFTTDPNIRVGYCSQIPNCDMSHGQDCYRGNGKNYMGNLSQTRSGLTCSMWDKNMEDLHRHIFWEPDASKLNENYCRNPDDDAHGPWCYTGNPLIPWDYCPISRCKYS

SEQ ID NO: 351 - DNA, 1495 bp, Homo sapiens
  SR023A08
attctttcacccaggcatctcctccagagggatccgccagcccgtccagcagcaccatgtgggtgaccaaactcctgccagccctgctgctgcagcatgtcctcctgcatctcctcctgctccccatcgccatcccctatgcagagggacaaaggaaaagaagaaatacaattcatgaattcaaaaaatcagcaaagactaccctaatcaaaatagatccagcactgaagataaaaaccaaaaaagtgaatactgcagaccaatgtgctaatagatgtactaggaataaaggacttccattcacttgcaaggcttttgtttttgataaagcaagaaaacaatgcctctggttccccttcaatagcatgtcaagtggagtgaaaaaagaatttggccatgaatttgacctctatgaaaacaaagactacattagaaactgcatcattggtaaaggacgcagctacaagggaacagtatctatcactaagagtggcatcaaatgtcagccctggagttccatgataccacacgaacacagctttttgccttcgagctatcggggtaaagacctacaggaaaactactgtcgaaatcctcgaggggaagaagggggaccctggtgtttcacaagcaatccagaggtacgctacgaagtctgtgacattcctcagtgttcagaagttgaatgcatgacctgcaatggggagagttatcgaggtctcatggatcatacagaatcaggcaagatttgtcagcgctgggatcatcagacaccacaccggcacaaattcttgcctgaaagatatcccgacaagggctttgatgataattattgccgcaatcccgatggccagccgaggccatggtgctatactcttgaccctcacacccgctgggagtactgtgcaattaaaacatgcgctgacaatactatgaatgacactgatgttcctttggaaacaactaaatgcatccaaggtcaaggagaaggctacaggggcactgtcaataccatttggaatggaattccatgtcagcgttgggattctcagtatcctcacgagcatgacatgactcctgaaaatttcaagtgcaaggacctacgagaaaattactgccgaaatccagatgggtctgaatcaccctggtgttttaccactgatccaaacatccgagttggctactgctcccaaattccaaactgtgatatgtcacatggacaagattgttatcgtgggaatggcaaaaattatatgggcaacttatcccaaacaagatctggactaacatgttcaatgtgggacaagaacatggaagacttacatcgtcatatcttctgggaaccagatgcaagtaagctgaatgagaattactgccgaaatccagatgatgatgctcatggaccctggtgctacacgggaaatccactcattccttgggattattgccctatttctcgttgtaagtacagttagggattggtgtcttgtgaaat

SEQ ID NO: 352 - protein, 472 aa, Homo sapiens
  SR023A08
MWVTKLLPALLLQHVLLHLLLLPIAIPYAEGQRKRRNTIHEFKKSAKTTLIKIDPALKIKTKKVNTADQCANRCTRNKGLPFTCKAFVFDKARKQCLWFPFNSMSSGVKKEFGHEFDLYENKDYIRNCIIGKGRSYKGTVSITKSGIKCQPWSSMIPHEHSFLPSSYRGKDLQENYCRNPRGEEGGPWCFTSNPEVRYEVCDIPQCSEVECMTCNGESYRGLMDHTESGKICQRWDHQTPHRHKFLPERYPDKGFDDNYCRNPDGQPRPWCYTLDPHTRWEYCAIKTCADNTMNDTDVPLETTKCIQGQGEGYRGTVNTIWNGIPCQRWDSQYPHEHDMTPENFKCKDLRENYCRNPDGSESPWCFTTDPNIRVGYCSQIPNCDMSHGQDCYRGNGKNYMGNLSQTRSGLTCSMWDKNMEDLHRHIFWEPDASKLNENYCRNPDDDAHGPWCYTGNPLIPWDYCPISRCKYS

SEQ ID NO: 353 - DNA, 1613 bp, Homo sapiens
  SR023E09
agcaccatgtgggtgaccaaactcctgccagccctgctgctgcagcatgtcctcctgcatctcctcctgctccccatcgccatcccctatgcagagggacaaaggaaaagaagaaatacaattcatgaattcaaaaaatcagcaaagactaccctaatcaaaatagatccagcactgaagataaaaaccaaaaaagtgaatactgcagaccaatgtgctaatagatgtactaggaataaaggacttccattcacttgcaaggcttttgtttttgataaagcaagaaaacaatgcctctggttccccttcaatagcatgtcaagtggagtgaaaaaagaatttggccatgaatttgacctctatgaaaacaaagactacattagaaactgcatcattggtaaaggacgcagctacaagggaacagtatctatcactaagagtggcatcaaatgtcagccctggagttccatgataccacacgaacacagctttttgccttcgagctatcggggtaaagacctacaggaaaactactgtcgaaatcctcgaggggaagaagggggaccctggtgtttcacaagcaatccagaggtacgctacgaagtctgtgacattcctcagtgttcagaagttgaatgcatgacctgcaatggggagagttatcgaggtctcatggatcatacagaatcaggcaagatttgtcagcgctgggatcatcagacaccacaccggcacaaattcttgcctgaaagatatcccgacaagggctttgatgataattattgccgcaatcccgatggccagccgaggccatggtgctatactcttgaccctcacacccgctgggagtactgtgcaattaaaacatgcgctgacaatactatgaatgacactgatgttcctttggaaacaactgaatgcatccaaggtcaaggagaaggctacaggggcactgtcaataccatttggaatggaattccatgtcagcgttgggattctcagtatcctcacgagcatgacatgactcctgaaaatttcaagtgcaaggacctacgagaaaattactgccgaaatccagatgggtctgaatcaccctggtgttttaccactgatccaaacatccgagttggctactgctcccaaattccaaactgtgatatgtcacatggacaagattgttatcgtgggaatggcaaaaattatatgggcaacttatcccaaacaagatctggactaacatgttcaatgtgggacaagaacatggaagacttacatcgtcatatcttctgggaaccagatgcaagtaagctgaatgagaattactgccgaaatccagatgatgatgctcatggaccctggtgctacacgggaaatccactcattccttgggattattgccctatttctcgttgtgaaggtgataccacacctacaatagtcaatttagaccatcccgtaatatcttgtgccaaaacgaaacaattgcgagttgtaaatgggattccaacacgaacaaacataggatggatggttagtttgagatacaggtaattattaatagatgcaagtcatgcatatccagaatatgtacaagagagtcctattcccagaaa

SEQ ID NO: 354 - protein, 514 aa, Homo sapiens
  SR023E09
MWVTKLLPALLLQHVLLHLLLLPIAIPYAEGQRKRRNTIHEFKKSAKTTLIKIDPALKIKTKKVNTADQCANRCTRNKGLPFTCKAFVFDKARKQCLWFPFNSMSSGVKKEFGHEFDLYENKDYIRNCIIGKGRSYKGTVSITKSGIKCQPWSSMIPHEHSFLPSSYRGKDLQENYCRNPRGEEGGPWCFTSNPEVRYEVCDIPQCSEVECMTCNGESYRGLMDHTESGKICQRWDHQTPHRHKFLPERYPDKGFDDNYCRNPDGQPRPWCYTLDPHTRWEYCAIKTCADNTMNDTDVPLETTECIQGQGEGYRGTVNTIWNGIPCQRWDSQYPHEHDMTPENFKCKDLRENYCRNPDGSESPWCFTTDPNIRVGYCSQIPNCDMSHGQDCYRGNGKNYMGNLSQTRSGLTCSMWDKNMEDLHRHIFWEPDASKLNENYCRNPDDDAHGPWCYTGNPLIPWDYCPISRCEGDTTPTIVNLDHPVISCAKTKQLRVVNGIPTRTNIGWMVSLRYR

SEQ ID NO: 355 - DNA, 3952 bp, Homo Sapiens
  ref <308>: DATABASE ACCESSION NUMBER: GenBank No. NM013993
  ref <309>: DATABASE ENTRY DATE: 2004-10-28
ggcttaggaagtattaactgatctctgccctagttctcatgtgttaaatatggatagtaatagtatctaccttatgaagtgactgtgaagataaaattatggattctgtttaagggtttaggccagtgtctggcacaggggaagcattctaaaaatatagctgatgctgttaaacaatgactgttgttgttgttttactgttattatccccaaagcggcccattctgtctgttgctgtcagctatgactcagtcccctgattaacttacgcaccacccattttatcccctgcagagatgctgcccccacccccttaggcccgagggatcaggagctatgggaccagaggccctgtcatctttactgctgctgctcttggtggcaagtggagatgctgacatgaagggacattttgatcctgccaagtgccgctatgccctgggcatgcaggaccggaccatcccagacagtgacatctctgcttccagctcctggtcagattccactgccgcccgccacagcaggttggagagcagtgacggggatggggcctggtgccccgcagggtcggtgtttcccaaggaggaggagtacttgcaggtggatctacaacgactgcacctggtggctctggtgggcacccagggacggcatgccgggggcctgggcaaggagttctcccggagctaccggctgcgttactcccgggatggtcgccgctggatgggctggaaggaccgctggggtcaggaggtgatctcaggcaatgaggaccctgagggagtggtgctgaaggaccttgggccccccatggttgcccgactggttcgcttctacccccgggctgaccgggtcatgagcgtctgtctgcgggtagagctctatggctgcctctggagggatggactcctgtcttacaccgcccctgtggggcagacaatgtatttatctgaggccgtgtacctcaacgactccacctatgacggacataccgtgggcggactgcagtatgggggtctgggccagctggcagatggtgtggtggggctggatgactttaggaagagtcaggagctgcgggtctggccaggctatgactatgtgggatggagcaaccacagcttctccagtggctatgtggagatggagtttgagtttgaccggctgagggccttccaggctatgcaggtccactgtaacaacatgcacacgctgggagcccgtctgcctggcggggtggaatgtcgcttccggcgtggccctgccatggcctgggagggggagcccatgcgccacaacctagggggcaacctgggggaccccagagcccgggctgtctcagtgccccttggcggccgtgtggctcgctttctgcagtgccgcttcctctttgcggggccctggttactcttcagcgaaatctccttcatctctgatgtggtgaacaattcctctccggcactgggaggcaccttcccgccagccccctggtggccgcctggcccacctcccaccaacttcagcagcttggagctggagcccagaggccagcagcccgtggccaaggccgaggggagcccgaccgccatcctcatcggctgcctggtggccatcatcctgctcctgctgctcatcattgccctcatgctctggcggctgcactggcgcaggctcctcagcaaggctgaacggagggtgttggaagaggagctgacggttcacctctctgtccctggggacactatcctcatcaacaaccgcccaggtcctagagagccacccccgtaccaggagccccggcctcgtgggaatccgccccactccgctccctgtgtccccaatggctctgcgttgctgctctccaatccagcctaccgcctccttctggccacttacgcccgtccccctcgaggcccgggcccccccacacccgcctgggccaaacccaccaacacccaggcctacagtggggactatatggagcctgagaagccaggcgccccgcttctgcccccacctccccagaacagcgtcccccattatgccgaggctgacattgttaccctgcagggcgtcaccgggggcaacacctatgctgtgcctgcactgcccccaggggcagtcggggatgggccccccagagtggatttccctcgatctcgactccgcttcaaggagaagcttggcgagggccagtttggggaggtgcacctgtgtgaggtcgacagccctcaagatctggttagtcttgatttcccccttaatgtgcgtaagggacaccctttgctggtagctgtcaagatcttacggccagatgccaccaagaatgccaggaatgatttcctgaaagaggtgaagatcatgtcgaggctcaaggacccaaacatcattcggctgctgggcgtgtgtgtgcaggacgaccccctctgcatgattactgactacatggagaacggcgacctcaaccagttcctcagtgcccaccagctggaggacaaggcagccgagggggcccctggggacgggcaggctgcgcaggggcccaccatcagctacccaatgctgctgcatgtggcagcccagatcgcctccggcatgcgctatctggccacactcaactttgtacatcgggacctggccacgcggaactgcctagttggggaaaatttcaccatcaaaatcgcagactttggcatgagccggaacctctatgctggggactattaccgtgtgcagggccgggcagtgctgcccatccgctggatggcctgggagtgcatcctcatggggaagttcacgactgcgagtgacgtgtgggcctttggtgtgaccctgtgggaggtgctgatgctctgtagggcccagccctttgggtcagctcaccgacgagcaggtcatcgagaacgcgggggagttcttccgggaccagggccggcagtgtacctgtcccggccgcctgcctgcccgcagggcctatatgagctgatgcttcggtgctggagccgggagtctgagcagcgaccacccttttcccagctgcatcggttcctggcagaggatgcactcaacacggtgtgaatcacacatccagctgcccctccctcagggagcgatccaggggaagccagtgacactaaaacaagaggacacaatggcacctctgcccttcccctcccgacagcccatcacctctaatagaggcagtgagactgcaggtgggctgggcccacccagggagctgatgccccttctccccttcctggacacactctcatgtccccttcctgttcttccttcctagaagcccccctgtcgcccacccagctggtcctgtggatgggatcctctccaccctcctctagccatcccttggggaagggtggggagaaatataggatagacactggacatggcccattggagcacctgggccccactggacaacactgattcctggagaggtggctgcgcccccagcttctctctccctgtcacacactggaccccactggctgagaatctgggggtgaggaggacaagaaggagaggaaaatgtttccttgtgcctgctcctgtacttgtcctcagcttgggcttcttcctcctccatcacctgaaacactggacctgggggtagccccgccccagccctcagtcacccccacttcccacttgcagtcttgtagctagaacttctctaagcctatacgtttctgtggagtaaatattgggattggggggaaagagggagcaacggcccatagccttggggttggacatctctagtgtagctgccacattgatttttctataatcacttggggtttgtacatttttggggggagagacacagatttttacactaatatatggacctagcttgaggcaattttaatcccctgcactaggcaggtaataataaaggttgagttttccacaaaaaaaaaaaaaa

SEQ ID NO: 356 - DNA, 3096 bp, Homo sapiens
  ref <308>: DATABASE ACCESSION NUMBER: GenBank No. NM006182
  ref <309>: DATABASE ENTRY DATE: 2004-10-26
catcttgcatcagcctgtggatgtatgcctaccaccgggctccttcaccagcaaagtggaaaaagaagcgtttcacaacaaattcttctttttgggttggggaaacgcagtggattatagctctgttttcttctttccaaaactgtgcacccctggatgaaacctccatcaagggagacctacaagttgcctggggttcagtgctctagaaagttccaaggtttgtggcttgaattattctaaagaagctgaaataattgaagagaagcagaggccagctgtttttgaggatcctgctccacagagaatgctctgcacccgttgatactccagttccaacaccatcttctgagatgatcctgattcccagaatgctcttggtgctgttcctgctgctgcctatcttgagttctgcaaaagctcaggttaatccagctatatgccgctatcctctgggcatgtcaggaggccagattccagatgaggacatcacagcttccagtcagtggtcagagtccacagctgccaaatatggaaggctggactcagaagaaggggatggagcctggtgccctgagattccagtggaacctgatgacctgaaggagtttctgcagattgacttgcacaccctccattttatcactctggtggggacccaggggcgccatgcaggaggtcatggcatcgagtttgcccccatgtacaagatcaattacagtcgggatggcactcgctggatctcttggcggaaccgtcatgggaaacaggtgctggatggaaatagtaacccctatgacattttcctaaaggacttggagccgcccattgtagccagatttgtccggttcattccagtcaccgaccactccatgaatgtgtgtatgagagtggagctttacggctgtgtctggctagatggcttggtgtcttacaatgctccagctgggcagcagtttgtactccctggaggttccatcatttatctgaatgattctgtctatgatggagctgttggatacagcatgacagaagggctaggccaattgaccgatggtgtgtctggcctggacgatttcacccagacccatgaataccacgtgtggcccggctatgactatgtgggctggcggaacgagagtgccaccaatggctacattgagatcatgtttgaatttgaccgcatcaggaatttcactaccatgaaggtccactgcaacaacatgtttgctaaaggtgtgaagatctttaaggaggtacagtgctacttccgctctgaagccagtgagtgggaacctaatgccatttccttcccccttgtcctggatgacgtcaaccccagtgctcggtttgtcacggtgcctctccaccaccgaatggccagtgccatcaagtgtcaataccattttgcagatacctggatgatgttcagtgagatcaccttccaatcagatgctgcaatgtacaacaactctgaagccctgcccacctctcctatggcacccacaacctatgatccaatgcttaaagttgatgacagcaacactcggatcctgattggctgcttggtggccatcatctttatcctcctggccatcattgtcatcatcctctggaggcagttctggcagaaaatgctggagaaggcttctcggaggatgctggatgatgaaatgacagtcagcctttccctgccaagtgattctagcatgttcaacaataaccgctcctcatcacctagtgaacaagggtccaactcgacttacgatcgcatctttccccttcgccctgactaccaggagccatccaggctgatacgaaaactcccagaatttgctccaggggaggaggagtcaggctgcagcggtgttgtgaagccagtccagcccagtggccctgagggggtgccccactatgcagaggctgacatagtgaacctccaaggagtgacaggaggcaacacatactcagtgcctgccgtcaccatggacctgctctcaggaaaagatgtggctgtggaggagttccccaggaaactcctaactttcaaagagaagctgggagaaggacagtttggggaggttcatctctgtgaagtggagggaatggaaaaattcaaagacaaagattttgccctagatgtcagtgccaaccagcctgtcctggtggctgtgaaaatgctccgagcagatgccaacaagaatgccaggaatgattttcttaaggagataaagatcatgtctcggctcaaggacccaaacatcatccatctattatctgtgtgtatcactgatgaccctctctgtatgatcactgaatacatggagaatggagatctcaatcagtttctttcccgccacgagccccctaattcttcctccagcgatgtacgcactgtcagttacaccaatctgaagtttatggctacccaaattgcctctggcatgaagtacctttcctctcttaattttgttcaccgagatctggccacacgaaactgtttagtgggtaagaactacacaatcaagatagctgactttggaatgagcaggaacctgtacagtggtgactattaccggatccagggccgggcagtgctccctatccgctggatgtcttgggagagtatcttgctgggcaagttcactacagcaagtgatgtgtgggcctttggggttactttgtgggagactttcaccttttgtcaagaacagccctattcccagctgtcagatgaacaggttattgagaatactggagagttcttccgagaccaagggaggcagacttacctccctcaaccagccatttgtcctgactctgtgtataagctgatgctcagctgctggagaagagatacgaagaaccgtccctcattccaagaaatccaccttctgctccttcaacaaggcgacgagtgatgctgtcagtgcctggccatgttcctacggctcaggtcctccctacaagacctaccactcacccatgcctatgccactccatctggacatttaatgaaactgagagacagaggcttgtttgctttgccctcttttcctggtcacccccactccctacccctgactcatatatact

SEQ ID NO: 357 - DNA, 3363 bp, Homo Sapiens
  ref <308>: DATABASE ACCESSION NUMBER: GenBank No. NM005232
  ref <309>: DATABASE ENTRY DATE: 2004-11-29
gcccccgcccggcccgccccgctctcctagtcccttgcaacctggcgctgccatccgggccactgtcccaggtcccggcccggagctatggagcggcgctggcccctggggctagggctggtgctgctgctctgcgccccgctgcccccgggggcgcgcgccaaggaagttactctgatggacacaagcaaggcacagggagagctgggctggctgctggatcccccaaaagatgggtggagtgaacagcaacagatactgaatgggacacccctgtacatgtaccaggactgcccaatgcaaggacgcagagacactgaccactggcttcgctccaattggatctaccgcggggaggaggcttcccgcgtccacgtggagctgcagttcaccgtgcgggactgcaagagtttccctgggggagccgggcctctgggctgcaaggagaccttcaaccttctgtacatggagagtgaccaggatgtgggcattcagctccgacggcccttgttccagaaggtaaccacggtggctgcagaccagagcttcaccattcgagaccttgcgtctggctccgtgaagctgaatgtggagcgctgctctctgggccgcctgacccgccgtggcctctacctcgctttccacaacccgggtgcctgtgtggccctggtgtctgtccgggtcttctaccagcgctgtcctgagaccctgaatggcttggcccaattcccagacactctgcctggccccgctgggttggtggaagtggcggggacctgcttgccccacgcgcgggccagccccaggccctcaggtgcaccccgcatgcactgcagccctgatggcgagtggctggtgcctgtaggacggtgccactgtgagcctggctatgaggaaggtggcagtggcgaagcatgtgttgcctgccctagcggctcctaccggatggacatggacacaccccattgtctcacgtgcccccagcagagcactgctgagtctgagggggccaccatctgtacctgtgagagcggccattacagagctcccggggagggcccccaggtggcatgcacaggtcccccctcggccccccgaaacctgagcttctctgcctcagggactcagctctccctgcgttgggaacccccagcagatacggggggacgccaggatgtcagatacagtgtgaggtgttcccagtgtcagggcacagcacaggacggggggccctgccagccctgtggggtgggcgtgcacttctcgccgggggcccgggcgctcaccacacctgcagtgcatgtcaatggccttgaaccttatgccaactacacctttaatgtggaagcccaaaatggagtgtcagggctgggcagctctggccatgccagcacctcagtcagcatcagcatggggcatgcagagtcactgtcaggcctgtctctgagactggtgaagaaagaaccgaggcaactagagctgacctgggcggggtcccggccccgaagccctggggcgaacctgacctatgagctgcacgtgctgaaccaggatgaagaacggtaccagatggttctagaacccagggtcttgctgacagagctgcagcctgacaccacatacatcgtcagagtccgaatgctgaccccactgggtcctggccctttctcccctgatcatgagtttcggaccagcccaccagtgtccaggggcctgactggaggagagattgtagccgtcatctttgggctgctgcttggtgcagccttgctgcttgggattctcgttttccggtccaggagagcccagcggcagaggcagcagaggcagcgtgaccgcgccaccgatgtggatcgagaggacaagctgtggctgaagccttatgtggacctccaggcatacgaggaccctgcacagggagccttggactttacccgggagcttgatccagcgtggctgatggtggacactgtcataggagaaggagagtttggggaagtgtatcgagggaccctgaggctccccagccaggactgcaagactgtggccattaagaccttaaaagacacatccccaggtggccagtggtggaacttccttcgagaggcaactatcatgggccagtttagccacccgcatattctgcatctggaaggcgtcgtcacaaagcgaaagccgatcatgatcatcacagaatttatggagaatggagccctggatgccttcctgagggagcgggaggaccagctggtccctgggcagctagtggccatgctgcagggcatagcatctggcatgaactacctcagtaatcacaattatgtccaccgggacctggctgccagaaacatcttggtgaatcaaaacctgtgctgcaaggtgtctgactttggcctgactcgcctcctggatgactttgatggcacatacgaaacccagggaggaaagatccctatccgttggacagcccctgaagccattgcccatcggatcttcaccacagccagcgatgtgtggagctttgggattgtgatgtgggaggtgctgagctttggggacaagccttatggggagatgagcaatcaggaggttatgaagagcattgaggatgggtaccggttgccccctcctgtggactgccctgcccctctgtatgagctcatgaagaactgctgggcatatgaccgtgcccgccggccacacttccagaagcttcaggcacatctggagcaactgcttgccaacccccactccctgcggaccattgccaactttgaccccagggtgactcttcgcctgcccagcctgagtggctcagatgggatcccgtatcgaaccgtctctgagtggctcgagtccatacgcatgaaacgctacatcctgcacttccactcggctgggctggacaccatggagtgtgtgctggagctgaccgctgaggacctgacgcagatgggaatcacactgcccgggcaccagaagcgcattctttgcagtattcagggattcaaggactgatccctcctctcaccccatgcccaatcagggtgcaaggagcaaggacggggccaaggtcgctcatggtcactccctgcgccccttcccacaacctgccagactaggctatcggtgctgcttctgcccactttcaggagaaccctgctctgcaccccagaaaacctctttgttttaaaagggaggtgggggtagaagtaaaaggatgatcatgggagggagctgaggggttaatatatatacatacatacacatatatatatttttgtaaataaacaggaactgattttctgcctccatcccacccatgagggctgcaggcactacaaaagagctgactactgagaa

SEQ ID NO: 358 - DNA, 3963 bp, Homo sapiens
  ref <308>: DATABASE ACCESSION NUMBER: GenBank No. NM004431
  ref <309>: DATABASE ENTRY DATE: 2004-12-20
attaaggactcggggcaggaggggcagaagttgcgcgcaggccggcgggcgggagcggacaccgaggccggcgtgcaggcgtgcgggtgtgcgggagccgggctcggggggatcggaccgagagcgagaagcgcggcatggagctccaggcagcccgcgcctgcttcgccctgctgtggggctgtgcgctggccgcggccgcggcggcgcagggcaaggaagtggtactgctggactttgctgcagctggaggggagctcggctggctcacacacccgtatggcaaagggtgggacctgatgcagaacatcatgaatgacatgccgatctacatgtactccgtgtgcaacgtgatgtctggcgaccaggacaactggctccgcaccaactgggtgtaccgaggagaggctgagcgtatcttcattgagctcaagtttactgtacgtgactgcaacagcttccctggtggcgccagctcctgcaaggagactttcaacctctactatgccgagtcggacctggactacggcaccaacttccagaagcgcctgttcaccaagattgacaccattgcgcccgatgagatcaccgtcagcagcgacttcgaggcacgccacgtgaagctgaacgtggaggagcgctccgtggggccgctcacccgcaaaggcttctacctggccttccaggatatcggtgcctgtgtggcgctgctctccgtccgtgtctactacaagaagtgccccgagctgctgcagggcctggcccacttccctgagaccatcgccggctctgatgcaccttccctggccactgtggccggcacctgtgtggaccatgccgtggtgccaccggggggtgaagagccccgtatgcactgtgcagtggatggcgagtggctggtgcccattgggcagtgcctgtgccaggcaggctacgagaaggtggaggatgcctgccaggcctgctcgcctggattttttaagtttgaggcatctgagagcccctgcttggagtgccctgagcacacgctgccatcccctgagggtgccacctcctgcgagtgtgaggaaggcttcttccgggcacctcaggacccagcgtcgatgccttgcacacgacccccctccgccccacactacctcacagccgtgggcatgggtgccaaggtggagctgcgctggacgccccctcaggacagcgggggccgcgaggacattgtctacagcgtcacctgcgaacagtgctggcccgagtctggggaatgcgggccgtgtgaggccagtgtgcgctactcggagcctcctcacggactgacccgcaccagtgtgacagtgagcgacctggagccccacatgaactacaccttcaccgtggaggcccgcaatggcgtctcaggcctggtaaccagccgcagcttccgtactgccagtgtcagcatcaaccagacagagccccccaaggtgaggctggagggccgcagcaccacctcgcttagcgtctcctggagcatccccccgccgcagcagagccgagtgtggaagtacgaggtcacttaccgcaagaagggagactccaacagctacaatgtgcgccgcaccgagggtttctccgtgaccctggacgacctggccccagacaccacctacctggtccaggtgcaggcactgacgcaggagggccagggggccggcagcaaggtgcacgaattccagacgctgtccccggagggatctggcaacttggcggtgattggcggcgtggctgtcggtgtggtcctgcttctggtgctggcaggagttggcttctttatccaccgcaggaggaagaaccagcgtgcccgccagtccccggaggacgtttacttctccaagtcagaacaactgaagcccctgaagacatacgtggacccccacacatatgaggaccccaaccaggctgtgttgaagttcactaccgagatccatccatcctgtgtcactcggcagaaggtgatcggagcaggagagtttggggaggtgtacaagggcatgctgaagacatcctcggggaagaaggaggtgccggtggccatcaagacgctgaaagccggctacacagagaagcagcgagtggacttcctcggcgaggccggcatcatgggccagttcagccaccacaacatcatccgcctagagggcgtcatctccaaatacaagcccatgatgatcatcactgagtacatggagaatggggccctggacaagttccttcgggagaaggatggcgagttcagcgtgctgcagctggtgggcatgctgcggggcatcgcagctggcatgaagtacctggccaacatgaactatgtgcaccgtgacctggctgcccgcaacatcctcgtcaacagcaacctggtctgcaaggtgtctgactttggcctgtcccgcgtgctggaggacgaccccgaggccacctacaccaccagtggcggcaagatccccatccgctggaccgccccggaggccatttcctaccggaagttcacctctgccagcgacgtgtggagctttggcattgtcatgtgggaggtgatgacctatggcgagcggccctactgggagttgtccaaccacgaggtgatgaaagccatcaatgatggcttccggctccccacacccatggactgcccctccgccatctaccagctcatgatgcagtgctggcagcaggagcgtgcccgccgccccaagttcgctgacatcgtcagcatcctggacaagctcattcgtgcccctgactccctcaagaccctggctgactttgacccccgcgtgtctatccggctccccagcacgagcggctcggagggggtgcccttccgcacggtgtccgagtggctggagtccatcaagatgcagcagtatacggagcacttcatggcggccggctacactgccatcgagaaggtggtgcagatgaccaacgacgacatcaagaggattggggtgcggctgcccggccaccagaagcgcatcgcctacagcctgctgggactcaaggaccaggtgaacactgtggggatccccatctgagcctcgacagggcctggagccccatcggccaagaatacttgaagaaacagagtggcctccctgctgtgccatgctgggccactggggactttatttatttctagttctttcctccccctgcaacttccgctgaggggtctcggatgacaccctggcctgaactgaggagatgaccagggatgctgggctgggccctctttccctgcgagacgcacacagctgagcacttagcaggcaccgccacgtcccagcatccctggagcaggagccccgccacagccttcggacagacatataggatattcccaagccgaccttccctccgccttctcccacatgaggccatctcaggagatggagggcttggcccagcgccaagtaaacagggtacctcaagccccatttcctcacactaagagggcagactgtgaacttgactgggtgagacccaaagcggtccctgtccctctagtgccttctttagaccctcgggccccatcctcatccctgactggccaaacccttgctttcctgggcctttgcaagatgcttggttgtgttgaggtttttaaatatatattttgtactttgtggagagaatgtgtgtgtgtggcagggggccccgccagggctggggacagagggtgtcaaacattcgtgagctggggactcagggaccggtgctgcaggagtgtcctgcccatgccccagtcggccccatctctcatccttttggataagtttctattctgtcagtgttaaagattttgttttgttggacatttttttcgaatcttaatttattattttttttatatttattgttagaaaatgacttatttctgctctggaataaagttgcagatgattcaaaccgaaaaaaaaaaaaaaaaaa

SEQ ID NO: 359 - DNA, 5826 bp, Homo sapiens
  ref <308>: DATABASE ACCESSION NUMBER: GenBank No. NM005233
  ref <309>: DATABASE ENTRY DATE: 2004-11-16
cccgctctgcttcagcgcacgctgaagacggcactaggacccagggaagtccccgagcggggttcgcggaaaggcagccagactcctccttatctccagtgtcaaacttgacatcagcctgcgagcggagcatggtaacttctccagcaatcagagcgctccccctcacatcagtggcatgcttcatggagatatgctcctctcactgccctctgcaccagcaacatggattgtcagctctccatcctcctccttctcagctgctctgttctcgacagcttcggggaactgattccgcagccttccaatgaagtcaatctactggattcaaaaacaattcaaggggagctgggctggatctcttatccatcacatgggtgggaagagatcagtggtgtggatgaacattacacacccatcaggacttaccaggtgtgcaatgtcatggaccacagtcaaaacaattggctgagaacaaactgggtccccaggaactcagctcagaagatttatgtggagctcaagttcactctacgagactgcaatagcattccattggttttaggaacttgcaaggagacattcaacctgtactacatggagtctgatgatgatcatggggtgaaatttcgagagcatcagtttacaaagattgacaccattgcagctgatgaaagtttcactcaaatggatcttggggaccgtattctgaagctcaacactgagattagagaagtaggtcctgtcaacaagaagggattttatttggcatttcaagatgttggtgcttgtgttgccttggtgtctgtgagagtatacttcaaaaagtgcccatttacagtgaagaatctggctatgtttccagacacggtacccatggactcccagtccctggtggaggttagagggtcttgtgtcaacaattctaaggaggaagatcctccaaggatgtactgcagtacagaaggcgaatggcttgtacccattggcaagtgttcctgcaatgctggctatgaagaaagaggttttatgtgccaagcttgtcgaccaggtttctacaaggcattggatggtaatatgaagtgtgctaagtgcccgcctcacagttctactcaggaagatggttcaatgaactgcaggtgtgagaataattacttccgggcagacaaagaccctccatccatggcttgtacccgacctccatcttcaccaagaaatgttatctctaatataaacgagacctcagttatcctggactggagttggcccctggacacaggaggccggaaagatgttaccttcaacatcatatgtaaaaaatgtgggtggaatataaaacagtgtgagccatgcagcccaaatgtccgcttcctccctcgacagtttggactcaccaacaccacggtgacagtgacagaccttctggcacatactaactacacctttgagattgatgccgttaatggggtgtcagagctgagctccccaccaagacagtttgctgcggtcagcatcacaactaatcaggctgctccatcacctgtcctgacgattaagaaagatcggacctccagaaatagcatctctttgtcctggcaagaacctgaacatcctaatgggatcatattggactacgaggtcaaatactatgaaaagcaggaacaagaaacaagttataccattctgagggcaagaggcacaaatgttaccatcagtagcctcaagcctgacactatatacgtattccaaatccgagcccgaacagccgctggatatgggacgaacagccgcaagtttgagtttgaaactagtccagactctttctccatctctggtgaaagtagccaagtggtcatgatcgccatttcagcggcagtagcaattattctcctcactgttgtcatctatgttttgattgggaggttctgtggctataagtcaaaacatggggcagatgaaaaaagacttcattttggcaatgggcatttaaaacttccaggtctcaggacttatgttgacccacatacatatgaagaccctacccaagctgttcatgagtttgccaaggaattggatgccaccaacatatccattgataaagttgttggagcaggtgaatttggagaggtgtgcagtggtcgcttaaaacttccttcaaaaaaagagatttcagtggccattaagaccctgaaagttggctacacagaaaagcagaggagagacttcctgggagaagcaagcattatgggacagtttgaccaccccaatatcattcgactggaaggagttgttaccaaaagtaagccagttatgattgtcacagaatacatggagaatggttccttggatagtttcctacgtaaacacgatgcccagtttactgtcattcagctagtggggatgcttcgagggatagcatctggcatgaagtacctgtcagacatgggctatgttcaccgagacctcgctgctcggaacatcttgatcaacagtaacttggtgtgtaaggtttctgatttcggactttcgcgtgtcctggaggatgacccagaagctgcttatacaacaagaggagggaagatcccaatcaggtggacatcaccagaagctatagcctaccgcaagttcacgtcagccagcgatgtatggagttatgggattgttctctgggaggtgatgtcttatggagagagaccatactgggagatgtccaatcaggatgtaattaaagctgtagatgagggctatcgactgccaccccccatggactgcccagctgccttgtatcagctgatgctggactgctggcagaaagacaggaacaacagacccaagtttgagcagattgttagtattctggacaagcttatccggaatcccggcagcctgaagatcatcaccagtgcagccgcaaggccatcaaaccttcttctggaccaaagcaatgtggatatcactaccttccgcacaacaggtgactggcttaatggtgtctggacagcacactgcaaggaaatcttcacgggtgtggagtacagttcttgtgacacaatagccaagatttccacagatgacatgaaaaaggttggtgtcaccgtggttgggccacagaagaagatcatcagtagcattaaagctctagaaacgcaatcaaagaatggcccagttcccgtgtaaagcacgggacggaagtgcttctggacggaagtggtggctgtggaaggcgtagcatcatcctgcagacagacaataattctggagatactggtggaagttccaagtccaataagacactcaaatatgagtacaaatgccttaaaatggaattgaaaaactctttattttcccctatcatttattggatgggtgggtggggtatttttttgtaattgcttttttaaatattagttaatggattaaatttaattcttcagcgtaaaatggtgaagaactagcatatagccattgatcataaactgactatcataaaatcaaaacaagtgaaataacaaaatggacatggtggctttgtttaggtagagccacaaaagaaaagacttgtaatatttttatatacagaggaaatctgtaacaggtattttgtttcttttaaagcaagcaacacagaggaatttatacctcaaactatctggccatatttactaccttatcactgcattattctcttttatctgtttaaagcatatagagatgaagtttgtagttgttttaagtactacacatttttaaattgttagcttccttaagtatatcatgtaaagaaatgtcttaatttttgaaaaaagtacatatttattttcttttgaattgtttttattgttttctatttatgccttgatgatttaatatggatttgttacagccaagtgccaaatgctctctcaaattgtcagcaatttaactagacacagataataatgggtttctttcagattttttgaaccatccacttacatatatttttaaaaaatgaaatccttttcctgttcatacactaaccaaatctctcaaatctgttatcccaatcattgttgcctctccgtttattataaactgtatgctcacaacttagtgtaatataccagcttgtatgcaatggattttcaaccagataacatacctttcctgctctggtgcttagagactatcaactccctcctttagtgaaggagccgtgttagagcttccgagaatagctccactggagagaagtggaatcctatatagaatgctgcactaattgacaacacagcctataggccaatgcatgagtaaaaaaaaaaacaattactggctcactggctttgaaaagtcacttactattgttgctgaaacttgctgagctgtttatagagaatgatgataacagaacttttcctctgtatcactggtgtttaggtgaattaattaaacattgtgatcattagtaccaggtattattatctttaagagtcttccacttcaatgcacatggtgcagttttggtgtgtaacttagaaggattgaacttctttgaatttactggacataacattttcagaatagttggtcatctagcaaccgcctcaaaatgtgtaagcaggagagaaatttctcatcacagggatttagacttactattacataaaggctaactatgagcttgctcattaattttgaaaagatgtacctggtggatatctagctagtaatatattctgaagcaacattttagctctattgatactctttctaatgctgatatgatcttgagtataagaaatgcatatgtcactagaatggataaaataatgctgcaaacttaatgttcttatgcaaaatggaacgctaatgaaacacagcttacaatcgcaaatcaaaactcacaagtgctcatctgttgtagatttagtgtaataagacttagattgtgctccttcggatatgattgtttctcaaatcttggcaatattccttagtcaaatcaggctactagaattctgtattggatatataagagcatgaaatttttaaaaatacacttgtgattataaaattaatcacaaatttcacttatacctgctatcagcagctagaaaacattttttttttaaatcaagtattttgtgtttggaatgttagaatgagatctgaatgtggtttcaatctaattttttcccagactactattttcttttttaggtactattctgagcatactcaacaaaacccatgcatttcataaactaatagaagttgaggattgttgaatctatttcacttattttggctgtggtttccatctgaaagtagaggttgtatacaccatatactgttcttcattttattaatatttttctccttgacctctcataaatttactttacacaattcttaccctgtacatatgtaaacataagtgtacgattcttaaccatggagtagaggtactagaatgcttacggccatctctttgtacaggaactgcattgactttcagtaaacataaagccacaactcctacatgatgttatgtaccatatgatctgttttgtatcttaaatttgatttacatatattatttatttctggtaactcactcagtttatgctgtgctaaatatcaatcaagccatgtataaatgtgatatgattggcaatatgtgtttactttaaacttgtcttttcaaaatattactcagtttatgttgtacaatgtagatggcctcttactaatgtaaaatgatttgtagtggaaacatttatatttttataataaacataatgaaaatattttttacagattggaaaaaaaaaaaaaaaaaaa

SEQ ID NO: 360 - DNA, 6364 bp, Homo sapiens
  ref <308>: DATABASE ACCESSION NUMBER: GenBank No. NM004438
  ref <309>: DATABASE ENTRY DATE: 2004-11-16
ctgggatagaagcggcaggagcagcgttggcaccggcgaaccatggctgggattttctatttcgccctattttcgtgtctcttcgggatttgcgacgctgtcacaggttccagggtataccccgcgaatgaagttaccttattggattccagatctgttcagggagaacttgggtggatagcaagccctctggaaggagggtgggaggaagtgagtatcatggatgaaaaaaatacaccaatccgaacctaccaagtgtgcaatgtgatggaacccagccagaataactggctacgaactgattggatcacccgagaaggggctcagagggtgtatattgagattaaattcaccttgagggactgcaatagtcttccgggcgtcatggggacttgcaaggagacgtttaacctgtactactatgaatcagacaacgacaaagagcgtttcatcagagagaaccagtttgtcaaaattgacaccattgctgctgatgagagcttcacccaagtggacattggtgacagaatcatgaagctgaacaccgagatccgggatgtagggccattaagcaaaaaggggttttacctggcttttcaggatgtgggggcctgcatcgccctggtatcagtccgtgtgttctataaaaagtgtccactcacagtccgcaatctggcccagtttcctgacaccatcacaggggctgatacgtcttccctggtggaagttcgaggctcctgtgtcaacaactcagaagagaaagatgtgccaaaaatgtactgtggggcagatggtgaatggctggtacccattggcaactgcctatgcaacgctgggcatgaggagcggagcggagaatgccaagcttgcaaaattggatattacaaggctctctccacggatgccacctgtgccaagtgcccaccccacagctactctgtctgggaaggagccacctcgtgcacctgtgaccgaggctttttcagagctgacaacgatgctgcctctatgccctgcacccgtccaccatctgctcccctgaacttgatttcaaatgtcaacgagacatctgtgaacttggaatggagtagccctcagaatacaggtggccgccaggacatttcctataatgtggtatgcaagaaatgtggagctggtgaccccagcaagtgccgaccctgtggaagtggggtccactacaccccacagcagaatggcttgaagaccaccaaagtctccatcactgacctcctagctcataccaattacacctttgaaatctgggctgtgaatggagtgtccaaatataaccctaacccagaccaatcagtttctgtcactgtgaccaccaaccaagcagcaccatcatccattgctttggtccaggctaaagaagtcacaagatacagtgtggcactggcttggctggaaccagatcggcccaatggggtaatcctggaatatgaagtcaagtattatgagaaggatcagaatgagcgaagctatcgtatagttcggacagctgccaggaacacagatatcaaaggcctgaaccctctcacttcctatgttttccacgtgcgagccaggacagcagctggctatggagacttcagtgagcccttggaggttacaaccaacacagtgccttcccggatcattggagatggggctaactccacagtccttctggtctctgtctcgggcagtgtggtgctggtggtaattctcattgcagcttttgtcatcagccggagacggagtaaatacagtaaagccaaacaagaagcggatgaagagaaacatttgaatcaaggtgtaagaacatatgtggacccctttacgtacgaagatcccaaccaagcagtgcgagagtttgccaaagaaattgacgcatcctgcattaagattgaaaaagttataggagttggtgaatttggtgaggtatgcagtgggcgtctcaaagtgcctggcaagagagagatctgtgtggctatcaagactctgaaagctggttatacagacaaacagaggagagacttcctgagtgaggccagcatcatgggacagtttgaccatccgaacatcattcacttggaaggcgtggtcactaaatgtaaaccagtaatgatcataacagagtacatggagaatggctccttggatgcattcctcaggaaaaatgatggcagatttacagtcattcagctggtgggcatgcttcgtggcattgggtctgggatgaagtatttatctgatatgagctatgtgcatcgtgatctggccgcacggaacatcctggtgaacagcaacttggtctgcaaagtgtctgattttggcatgtcccgagtgcttgaggatgatccggaagcagcttacaccaccaggggtggcaagattcctatccggtggactgcgccagaagcaattgcctatcgtaaattcacatcagcaagtgatgtatggagctatggaatcgttatgtgggaagtgatgtcgtacggggagaggccctattgggatatgtccaatcaagatgtgattaaagccattgaggaaggctatcggttaccccctccaatggactgccccattgcgctccaccagctgatgctagactgctggcagaaggagaggagcgacaggcctaaatttgggcagattgtcaacatgttggacaaactcatccgcaaccccaacagcttgaagaggacagggacggagagctccagacctaacactgccttgttggatccaagctcccctgaattctctgctgtggtatcagtgggcgattggctccaggccattaaaatggaccggtataaggataacttcacagctgctggttataccacactagaggctgtggtgcacgtgaaccaggaggacctggcaagaattggtatcacagccatcacgcaccagaataagattttgagcagtgtccaggcaatgcgaacccaaatgcagcagatgcacggcagaatggttcccgtctgagccagtactgaataaactcaaaactcttgaaattagtttacctcatccatgcactttaattgaagaactgcactttttttacttcgtcttcgccctctgaaattaaagaaatgaaaaaaaaaaacaatatctgcagcgttgcttggtgcacagattgctgaaactgtggggcttacagaaatgactgccggtcatttgaatgagacctggaacaaatcgtttctcagaagtacttttctgttcatcaccagtctgtaaaatacatgtacctatagaaatagaacactgcctctgagttttgatgctgtatttgctgccagacactgagcttctgagacatccctgattctctctccatttggaattacaaccattgtattttgtttgtggcataaattacagtcatctgtctttcactggaatgaagaccatgcctaggaacattttttaaggactcagctgtggcttttagggcttggttcataccatgggggaaaaaaaagtcctaggagaaagcgacgtggctcattagtgttgcctcttcagtgctcaagccgcctggtggattcctatgacacagggggcctggaaagaaagggaaagtggatttaaaatatatatatacgtaacccaagccccataacccctaactggacaaatgaggtctgtttctttgggcctgaggctgtgccatataaagtcttattttgggactttacaaacttgtcctaactatcttgtggatagtgggctgtgacaatctggaatagagaacgttcacacttcgctcctttaaagaagcgaccccagatctgcaagggagtagattctgctatcttggcctcacagcccttcctgttgattacaaagcccgtggaagaaaacagaacacaccctcctcagttccgtctaaatgtgtttcttctgcttcaattacaccagttctggggcaaagacactgatgaaacaacacccatacctgaaaagaataaatgtgtgactttcaaatcccctttcgcagtgaaagaaacagcaaacacttaagattcagcatctgttctccagttgcactgaggaatgcactgtctcgcagcaccagctctgcagagcccttgccccagactctttgcggttttatttatatgtatttccatatttcattcctgtgtgtcactgctgcattggtgtggcagcaagtgaccaaatgctacaggtcttactatggacaccaggtcaggtgcaaccacacaaaacaaagccagttccatgagctgcctatgatatgcattgcggaagtaacattttacccagggtgtgccattgcagtgatataaatatatttttttcttagactaaatatgagctgactatctcttttgatgtgtgtacataggtgtgagtgtgtgtgtatgcgtgcctgtctgtgtgcgggtgtgtgtatgtgcatagcctcatgcttaggactacccatgaatgttgtggaatgctacacctggagagttctggttttccaccagtttcaagatgaagaactacatgatacagtggacctggagaccatccccttggaaagacaacccagagatgttcagcatcctgtatctacacgcatcctgtatctacacgtgtattttgtagctgtcacactaaccttaataagaattctacagctttggacagaggcattttcaccttaatggtgaagtaatttaaaatataaatccattcaggtgacaacccatcatcaaaattacaaattttctgattgaactcatctgaatcatcagttccttgatggagagagagaaggagatggaatgtgtctggtaaccccaaatggagtacaagtagcctttgttttcctgcataaatggacttgttgaatgcgaacgaatatatgcaattcatatacttttggagatgaacgtagatatgtgtgtcagctttgagatggtgtgtcctggattaatactttgtctcccaatatcacagaaaaatacatgccagtgactcttgaggttaaggtagttgggatgaaatggcctcaggcaatttcacattccctaattacctggaaagttctacagtaattaatatgcagctaactcctgttgccctcacaagagcatcagccttctagaatcggagctccggagtgtgaagattcagtattgatatgatatgtataccaaactccagccaacttactgccatttttcataatctgagtggctgccttgcttatcctaagctgtggttgcagaaaccgtggccatttatataagctataacatcaaatcagggaaaaatgaggaaaaaaaatagattctgaaccatttattgttgaataagtagagaaaatcatcaataaatatttattacattctgacagggtgtgtggcattgtgttctatgccagagtgacaaagttgattcacccctttttggggaccttaatatattttttaagggatgtgcctatgcattgatgcctgaaaaatatgtataaagaaatgaggttgactcttctgagcagttcatcttttccagaggtaagggtaggaggccaacttcagggtctgggtctgagcccgtgggcaagccctggccgagtgagctccaatgctaactcatgtgccgatctctagagcagtgggaaactaccccgctgcaccaaatcaagtagcttcaccttgtgtatgcaggccccaagttattttttagcaatcttacgagtgaaatgttctggtgggttgaaaaacgttcttattttaaagaaaggttgtgctcgctacactgctggtgtgtgcattctgagacctcttgtattcaatctgtgaaggatatgtgtattaatccgtacacccgtatagcctcaatatttgtctgaagacacttaaattctgacccataaaggaaagttctagaagcaatattttcacttatttaacattctccaaacaacatcaagcattgatacacactgaagagtgcgtttattttttgtatcactctaagtatgttggaatatgcaaggactgtggttcaaattagaatgtataaggcatattataatttagttcatactgaataagaaattaacagaacattgttcggttcacacgttccaaactttgagtgatttctggagttagacatagattttctattttgttttaatttgtcaaggtatttttcttcccttcatgaactttaggtacacataacttatgtcatttatttatggtcttttatacctagtttgtaaaattgtaaaatagcaaactaaatgcaaagagtttgcatttgaaaataataaagtagttgccgtatacaaccctgcaaaaaaaaaaaaaaaaaa

SEQ ID NO: 361 - DNA, 3162 bp, Homo sapiens
  ref <308>: DATABASE ACCESSION NUMBER: GenBank No. L36644
  ref <309>: DATABASE ENTRY DATE: 1995-08-10
ccagcgtccctggccggctgctactctgcacctcgacgggctcccctctggacgtgccttctcctgtgcgccgcactccggaccctcctggccagccccagcaacgaagtgaatttattggattcacgcactgtcatgggggacctgggatggattgcttttccaaaaaatgggtgggaagagattggtgaagtggatgaaaattatgcccctatccacacataccaagtatgcaaagtgatggaacagaatcagaataactggcttttgaccagttggatctccaatgaaggtgcttccagaatcttcatagaactcaaatttaccctgcgggactgcaacagccttcctggaggactggggacctgtaaggaaacctttaatatgtattactttgagtcagatgatcagaatgggagaaacatcaaggaaaaccaatacatcaaaattgataccattgctgccgatgaaagctttacagaacttgatcttggtgaccgtgttatgaaactgaatacagaggtcagagatgtaggacctctaagcaaaaagggattttatcttgcttttcaagatgttggtgcttgcattgctctggtttctgtgcgtgtatactataaaaaatgcccttctgtggtacgacacttggctgtcttccctgacaccatcactggagctgattcttcccaattgctcgaagtgtcaggctcctgtgtcaaccattctgtgaccgatgaacctcccaaaatgcactgcagcgccgaaggggagtggctggtgcccatcgggaaatgcatgtgcaaggcaggatatgaagagaaaaatggcacctgtcaagtgtgcagacctgggttcttcaaagcctcacctcacatccagagctgcggcaaatgtccacctcacagttatacccatgaggaagcttcaacctcttgtgtctgtgaaaaggattatttcaggagagagtctgatccacccacaatggcatgcacaagacccccctctgctcctcggaatgccatctcaaatgttaatgaaactagtgtctttctggaatggattccgcctgctgacactggtggaaggaaagacgtgtcatattatattgcatgcaagaagtgcaactcccatgcaggtgtgtgtgaggagtgtggcggtcatgtcaggtaccttccccggcaaagcggcctgaaaaacacctctgtcatgatggtggatctactcgctcacacaaactatacctttgagattgaggcagtgaatggagtgtccgacttgagcccaggagcccggcagtatgtgtctgtaaatgtaaccacaaatcaagcagctccatctccagtcaccaatgtgaaaaaagggaaaattgcaaaaaacagcatctctttgtcttggcaagaaccagatcgtcccaatggaatcatcctagagtatgaaatcaagcattttgaaaaggaccaagagaccagctacacgattatcaaatctaaagagacaactattactgcagagggcttgaaaccagcttcagtttatgtcttccaaattcgagcacgtacagcagcaggctatggtgtcttcagtcgaagatttgagtttgaaaccaccccagtgtttgcagcatccagcgatcaaagccagattcctgtaattgctgtgtctgtgacagtaggagtcattttgttggcagtggttatcggcgtcctcctcagtggaaggcggtgtggctacagcaaagcaaaacaagatccagaagaggaaaagatgcattttcataatgggcacattaaactgccaggagtaagaacttacattgatccacatacctatgaggatcccaatcaagctgtccacgaatttgccaaggagatagaagcatcatgtatcaccattgagagagttattggagcaggtgaatttggtgaagtttgtagtggacgtttgaaactaccaggaaaaagagaattacctgtggctatcaaaacccttaaagtaggctatactgaaaagcaacgcagagatttcctaggtgaagcaagtatcatgggacagtttgatcatcctaacatcatccatttagaaggtgtggtgaccaaaagtaaaccagtgatgatcgtgacagagtatatggagaatggctctttagatacatttttgaagaaaaacgatgggcagttcactgtgattcagcttgttggcatgctgagaggtatctctgcaggaatgaagtacctttctgacatgggctatgtgcatagagatcttgctgccagaaacatcttaatcaacagtaaccttgtgtgcaaagtgtctgactttggactttcccgggtactggaagatgatcccgaggcagcctacaccacaaggggaggaaaaattccaatcagatggactgccccagaagcaatagctttccgaaagtttacttctgccagtgatgtctggagttatggaatagtaatgtgggaagttgtgtcttatggagagagaccctactgggagatgaccaatcaagatgtgattaaagcggtagaggaaggctatcgtctgccaagccccatggattgtcctgctgctctctatcagttaatgctggattgctggcagaaagagcgaaatagcaggcccaagtttgatgaaatagtcaacatgttggacaagctgatacgtaacccaagtagtctgaagacgctggttaatgcatcctgcagagtatctaatttattggcagaacatagcccactaggatctggggcctacagatcagtaggtgaatggctagaggcaatcaagatgggccggtatacagagattttcatggaaaatggatacagttcaatggacgctgtggctcaggtgaccttggaggatttgagacggcttggagtgactcttgtcggtcaccagaagaagatcatgaacagccttcaagaaatgaaggtgcagctggtaaacggaatggtgccattgtaacttcatgtaaatgtcgcttcttcaagtgaatgattctgcactttgtaaacagcactgagatttattttaacaaaaaaagggggaaaagggaaaacagtgatttctaaaccttagaaaacatttgcctcagccacagaatttgtaatcatggttttactgaagtatccagttcttagtccttagtct

SEQ ID NO: 362 - DNA, 1619 bp, Homo sapiens
  ref <308>: DATABASE ACCESSION NUMBER: GenBank No. AL133666
  ref <309>: DATABASE ENTRY DATE: 2005-01-20
aggaaagctaagacaaacaaaactacaatggaagaagaaaacgtcctcaactagacatctgccaaaaatatcatccagaatgccctggcaagttcacttccatttagtgaagtgagataatttggcaattcacgcaagagactgagaaccaagcctcaagccctgcctctgattctgcaggtatggaacatgagcagctgacctactcttccacaaggtccaaagcccccagtgtcatcatcacaggtcttaagccagccaccaaatatgtatttcacatccgagtgagaactgcgacaggatacagtggctacagtcagaaatttgaatttgaaacaggagatgaaagactctccatttcaagtgacaaaactgtactggcttaatgaaaagtgggactttattgcctcagcttctgacatggcagcagaacaaggacagattctcgtgatagccaccgccgctgttggcggattcactctcctcgtcatcctcactttattcttcttgatcactgggagatgtcagtggtacataaaagccaagatgaagtcagaagagaagagaagaaaccacttacagaatgggcatttgcgcttcccgggaattaaaacttacattgatccagatacatatgaagacccatccctagcagtccatgaatttgcaaaggagattgatccctcaagaattcgtattgagagagtcattggggcaggtgaatttggagaagtctgtagtgggcgtttgaagacaccagggaaaagagagatcccagttgccattaaaactttgaaaggtggccacatggatcggcaaagaagagattttctaagagaagctagtatcatgggccagtttgaccatccaaacatcattcgcctagaaggggttgtcaccaaaagatccttcccggccattggggtggaggcgttttgccccagcttcctgagggcagggtttttaaatagcatccaggccccgcatccagtgccagggggaggatctttgccccccaggattcctgctggcagaccagtaatgattgtggtggaatatatggagaatggatccctagactcctttttgcggaagcatgatggccacttcacagtcatccagttggtcggaatgctccgaggcattgcatcaggcatgaagtatctttctgatatgggttatgttcatcgagacctagcggctcggaatatactggtcaatagcaacttagtatgcaaagtttctgattttggtctctccagagtgctggaagatgatccagaagctgcttatacaacaactgacctcttccaaactctaacacttaacctctgctattctgcataaattctgagaaaagccaaattttctgtcggtctaagaagacatagcctacacccaactggagataattataaaaaataatgaagcagcatgaggggaaggtatttaatgtgtattttaaagttgggagagattctccttcacctaatttaggtgtttgtgaattggcttgactttttgaagttaatttttaagccttgaacatgtccaactttaagaactttaagaataaatattttaacacaagtgaaaaaaaaaaaaaaaaaaaaaaaagg

SEQ ID NO: 363 - DNA, 4996 bp, Homo sapiens
  ref <308>: DATABASE ACCESSION NUMBER: GenBank No. NM004440
  ref <309>: DATABASE ENTRY DATE: 2005-01-26
gcgccggggtgtgcgcccggccgggtgtgcggagagcgagggagcgcgctccctcccgacgcgcgggccgcagcggccaagcccgagggtgcgtggcgcccccgcccgcccggcccggcccggccatggcccccgcccggggccgcctgccccctgcgctctgggtcgtcacggccgcggcggcggcggccacctgcgtgtccgcggcgcgcggcgaagtgaatttgctggacacgtcgaccatccacggggactggggctggctcacgtatccggctcatgggtgggactccatcaacgaggtggacgagtccttccagcccatccacacgtaccaggtttgcaacgtcatgagccccaaccagaacaactggctgcgcacgagctgggtcccccgagacggcgcccggcgcgtctatgctgagatcaagtttaccctgcgcgactgcaacagcatgcctggtgtgctgggcacctgcaaggagaccttcaacctctactacctggagtcggaccgcgacctgggggccagcacacaagaaagccagttcctcaaaatcgacaccattgcggccgacgagagcttcacaggtgccgaccttggtgtgcggcgtctcaagctcaacacggaggtgcgcagtgtgggtcccctcagcaagcgcggcttctacctggccttccaggacataggtgcctgcctggccatcctctctctccgcatctactataagaagtgccctgccatggtgcgcaatctggctgccttctcggaggcagtgacgggggccgactcgtcctcactggtggaggtgaggggccagtgcgtgcggcactcagaggagcgggacacacccaagatgtactgcagcgcggagggcgagtggctcgtgcccatcggcaaatgcgtgtgcagtgccggctacgaggagcggcgggatgcctgtgtggcctgtgagctgggcttctacaagtcagcccctggggaccagctgtgtgcccgctgccctccccacagccactccgcagctccagccgcccaagcctgccactgtgacctcagctactaccgtgcagccctggacccgccgtcctcagcctgcacccggccaccctcggcaccagtgaacctgatctccagtgtgaatgggacatcagtgactctggagtgggcccctcccctggacccaggtggccgcagtgacatcacctacaatgccgtgtgccgccgctgcccctgggcactgagccgctgcgaggcatgtgggagcggcacccgctttgtgccccagcagacaagcctggtgcaggccagcctgctggtggccaacctgctggcccacatgaactactccttctggatcgaggccgtcaatggcgtgtccgacctgagccccgagccccgccgggccgctgtggtcaacatcaccacgaaccaggcagccccgtcccaggtggtggtgatccgtcaagagcgggcggggcagaccagcgtctcgctgctgtggcaggagcccgagcagccgaacggcatcatcctggagtatgagatcaagtactacgagaaggacaaggagatgcagagctactccaccctcaaggccgtcaccaccagagccaccgtctccggcctcaagccgggcacccgctacgtgttccaggtccgagcccgcacctcagcaggctgtggccgcttcagccaggccatggaggtggagaccgggaaaccccggccccgctatgacaccaggaccattgtctggatctgcctgacgctcatcacgggcctggtggtgcttctgctcctgctcatctgcaagaagaggcactgtggctacagcaaggccttccaggactcggacgaggagaagatgcactatcagaatggacaggcacccccacctgtcttcctgcctctgcatcaccccccgggaaagctcccagagccccagttctatgcggaaccccacacctacgaggagccaggccgggcgggccgcagtttcactcgggagatcgaggcctctaggatccacatcgagaaaatcatcggctctggagactccggggaagtctgctacgggaggctgcgggtgccagggcagcgggatgtgcccgtggccatcaaggccctcaaagccggctacacggagagacagaggcgggacttcctgagcgaggcgtccatcatggggcaattcgaccatcccaacatcatccgcctcgagggtgtcgtcacccgtggccgcctggcaatgattgtgactgagtacatggagaacggctctctggacaccttcctgaggacccacgacgggcagttcaccatcatgcagctggtgggcatgctgagaggagtgggtgccggcatgcgctacctctcagacctgggctatgtccaccgagacctggccgcccgcaacgtcctggttgacagcaacctggtctgcaaggtgtctgacttcgggctctcacgggtgctggaggacgacccggatgctgcctacaccaccacgggcgggaagatccccatccgctggacggccccagaggccatcgccttccgcaccttctcctcggccagcgacgtgtggagcttcggcgtggtcatgtgggaggtgctggcctatggggagcggccctactggaacatgaccaaccgggatgtcatcagctctgtggaggaggggtaccgcctgcccgcacccatgggctgcccccacgccctgcaccagctcatgctcgactgttggcacaaggaccgggcgcagcggcctcgcttctcccagattgtcagtgtcctcgatgcgctcatccgcagccctgagagtctcagggccaccgccacagtcagcaggtgcccaccccctgccttcgtccggagctgctttgacctccgagggggcagcggtggcggtgggggcctcaccgtgggggactggctggactccatccgcatgggccggtaccgagaccacttcgctgcgggcggatactcctctctgggcatggtgctacgcatgaacgcccaggacgtgcgcgccctgggcatcaccctcatgggccaccagaagaagatcctgggcagcattcagaccatgcgggcccagctgaccagcacccaggggccccgccggcacctctgatgtacagccagcagggcccaggcagccaccaagcccaccccaggtcatgccagcggcagaggacgtgaggggctggcagcaggcagggcggccccaggcctctgccctcctctcaggtgctggaggagctgaaggcttcgccacaggacctggagttatcaggggtcaggcgcctgggaaggggcctttggtggccaccctggtgaggacacctgtcccccagggcaggcaccttctcttttccagagcctggggcctccacgtcacagagtccaacagggacatcactcgcctgcctctgtgtgcgtgcatgtgtgtgtgtggtggggggtgttctcacaaggtcatgggatctcatgtgaacagtgtgtgatcaagtgtgtccaccccttcgggtctcagcatggacgtgtgcatgttatgagcgtgtgcttatccgttaaggctggaggcacatgtgggtgatggtggatgatgtgtcatgaatgaggaggtgtgtgagcagggaactcagtgtgacaccgccaggtccagcacccatgggggcgggggagaggctcacccctacgtccccccacacctggaggctggagccaggggccacttctgaactgcaccagcaccaggcccaccctcgtctctgcctgggtgagcccaccccggctgtatctcaggtctgggtcctccctctagccgaggaggccacctgcagcctccacccggctctcaccgctgcttcaacaggaaaacagggttcccggtcagtccggctggccgccttcatggaggcatcatggcagagcacatgagatgtcctcagctgggcttggctgcctggccagggccgggggctcagcagcctcctctagcctctgatgccttccctccacggcccaggtctcctcactcaaagtcccttcgccaacctttcaatgcccagccctgacacctgccctttgtcccccaggcctaggatcagggaccagaggatcctatcttctcagcacccagcccaccccttcctgtagcatatggggagactaaggcctggagagaggggtgatgccccgtcccaggttgcactgcaaccaagtgtcagagtcggggctccggcctcctgccaaggctcttgtccccatacaccatcccacaagggcgctgggggtggaagtgccctggaagcccctcccctctcacactgacctccccccttacggcccaccagggtatgtaaatatctcttttctaccatgtcagaatattttttcctcactcctgacaatgcaaaaatggtcttcaaagcacataaaaagcacccagggtgagaaagccccatcccgggggccgttggcaggcagggaagcaggaaccccaccgtgtgccccctgccagccccagagggagtggcgagcccagctgcccagccctgccccccctccccatagccagcacagctatcccgcggggacaccagcactgagccccctctccctcctgcaataattcggggagtctcagccccatccaggtgccgcggccagctctctacacctctatatattatattactatatagccgagctgttcttccttcctatggaagtcggaaacatggtcagaacacgatctgggggggggatcctgtcttcctccccaccccaccccactcttacccaatttctgggctctggatcctcacagtcatggaggcaccgtgggcctggcacttgcaaaagtgtggcccctcactctagtgtgtggtccctctcagggtcctggggatctgcctctctgtggtctccatcctgactcttgaacttacccacaataagaataaattctgcctcatcttt

SEQ ID NO: 364 - DNA, 5229 bp, Homo sapiens
  ref <308>: DATABASE ACCESSION NUMBER: GenBank No. NM020526
  ref <309>: DATABASE ENTRY DATE: 2004-11-16
gcagtcggagacttgcaggcagcaaacacggtgcgagcgaacaggagtgggggggaaattaaaaaaagctaaacgtggagcagccgatcggggaccgagaaggggaatcgatgcaaggagcacaataaaacaaaagctacttcggaacaaacagcatttaaaaatccacgactcaagataactgaaacctaaaataaaacctgctcatgcaccatggtttttcaaactcggtacccttcatggattattttatgctacatctggctgctccgctttgcacacacaggggaggcgcaggctgcgaaggaagtactactgctggattctaaagcacaacaaacagagttggagtggatttcctctccacccaatgggtgggaagaaattagtggtttggatgagaactataccccgatacgaacataccaggtgtgccaagtcatggagcccaaccaaaacaactggctgcggactaactggatttccaaaggcaatgcacaaaggatttttgtagaattgaaattcaccctgagggattgtaacagtcttcctggagtactgggaacttgcaaggaaacatttaatttgtactattatgaaacagactatgacactggcaggaatataagagaaaacctctatgtaaaaatagacaccattgctgcagatgaaagttttacccaaggtgaccttggtgaaagaaagatgaagcttaacactgaggtgagagagattggacctttgtccaaaaagggattctatcttgcctttcaggatgtaggggcttgcatagctttggtttctgtcaaagtgtactacaagaagtgctggtccattattgagaacttagctatctttccagatacagtgactggttcagaattttcctctttagtcgaggttcgagggacatgtgtcagcagtgcagaggaagaagcggaaaacgcccccaggatgcactgcagtgcagaaggagaatggttagtgcccattggaaaatgtatctgcaaagcaggctaccagcaaaaaggagacacttgtgaaccctgtggccgtgggttctacaagtcttcctctcaagatcttcagtgctctcgttgtccaactcacagtttttctgataaagaaggctcctccagatgtgaatgtgaagatgggtattacagggctccatctgacccaccatacgttgcatgcacaaggcctccatctgcaccacagaacctcattttcaacatcaaccaaaccacagtaagtttggaatggagtcctcctgcagacaatgggggaagaaacgatgtgacctacagaatattgtgtaagcggtgcagttgggagcagggcgaatgtgttccctgtgggagtaacattggatacatgccccagcagactggattagaggataactatgtcactgtcatggacctgctagcccacgctaattatacttttgaagttgaagctgtaaatggagtttctgacttaagccgatcccagaggctctttgctgctgtcagtatcaccactggtcaagcagctccctcgcaagtgagcggagtaatgaaggagagagtactgcagcggagtgtcgagctttcctggcaggaaccagagcatcccaatggagtcatcacagaatatgaaatcaagtattacgagaaagatcaaagggaacggacctactcaacagtaaaaaccaagtctacttcagcctccattaataatctgaaaccaggaacagtgtatgttttccagattcgggcttttactgctgctggttatggaaattacagtcccagacttgatgttgctacactagaggaagctacaggtaaaatgtttgaagctacagctgtctccagtgaacagaatcctgttattatcattgctgtggttgctgtagctgggaccatcattttggtgttcatggtctttggcttcatcattgggagaaggcactgtggttatagcaaagctgaccaagaaggcgatgaagagctttactttcattttaaatttccaggcaccaaaacctacattgaccctgaaacctatgaggacccaaatagagctgtccatcaattcgccaaggagctagatgcctcctgtattaaaattgagcgtgtgattggtgcaggagaattcggtgaagtctgcagtggccgtttgaaacttccagggaaaagagatgttgcagtagccataaaaaccctgaaagttggttacacagaaaaacaaaggagagactttttgtgtgaagcaagcatcatggggcagtttgaccacccaaatgttgtccatttggaaggggttgttacaagagggaaaccagtcatgatagtaatagagttcatggaaaatggagccctagatgcatttctcaggaaacatgatgggcaatttacagtcattcagttagtaggaatgctgagaggaattgctgctggaatgagatatttggctgatatgggatatgttcacagggaccttgcagctcgcaatattcttgtcaacagcaatctcgtttgtaaagtgtcagattttggcctgtcccgagttatagaggatgatccagaagctgtctatacaactactggtggaaaaattccagtaaggtggacagcacccgaagccatccagtaccggaaattcacatcagccagtgatgtatggagctatggaatagtcatgtgggaagttatgtcttatggagaaagaccttattgggacatgtcaaatcaagatgttataaaagcaatagaagaaggttatcgtttaccagcacccatggactgcccagctggccttcaccagctaatgttggattgttggcaaaaggagcgtgctgaaaggccaaaatttgaacagatagttggaattctagacaaaatgattcgaaacccaaatagtctgaaaactcccctgggaacttgtagtaggccaataagccctcttctggatcaaaacactcctgatttcactaccttttgttcagttggagaatggctacaagctattaagatggaaagatataaagataatttcacggcagctggctacaattcccttgaatcagtagccaggatgactattgaggatgtgatgagtttagggatcacactggttggtcatcaaaagaaaatcatgagcagcattcagactatgagagcacaaatgctacatttacatggaactggcattcaagtgtgatatgcatttctcccttttaagggagattacagactgcaagagaacagtactggccttcagtatatgcatagaatgctgctagaagacaagtgatgtcctgggtccttccaacagtgaagagaagatttaagaagcacctatagacttgaactcctaagtgccaccagaatatataaaaagggaatttaggatccaccatcggtggccaggaaaatagcagtgacaataaacaaagtactacctgaaaaacatccaaacaccttgagctctctaacctcctttttgtcttatagactttttaaaatgtacataaagaatttaagaaagaatatatttgtcaaataaaatcatgatcttattgttaaaattaatgaaatattttccttaaatatgtgatttcagactattcctttttaaaatcatttgtgtttattcttcataaggactttgttttagaaagctgtttatagctttggacctttttagtgttaaatctgtaacattactacactgggtacctttgaaagaatctcaaatttcaaaagaaatagcatgattgaagatacatctctgttagaacattggtatcctttttgtgccattttattctgtttaatcagtgctgttttgatattgtttgctaattggcaggtagtcaagaaaatgcaagttgccaagagctctgatattttttaaaaagaatttttttgtaaagatcagacaacacactatcttttcaatgaaaaaagcaataatgatccatacatactataaggcacttttaacagattgtttatagagtgattttactagaaagaatttaataaactcgaagtttaggtttatgagtatataaacaaatgaggcacttcatctgaagaatgttggtgaaggcaagtctctgaaagcagaactatccagtgttatctaaaaattaatctgagcacatcaagattttttcattctcgtgacattaggaaatttaggataaatagttgacatatattttatatcctcttctgttgaatgcagtccaaacatgaaaggaaataattgttttatattataactctgaagcatgataaaggggcagttcacaattttcaccatttaaacacaaatttgctgcacagaatatcaccattgcagttcaaaacaaaacaaaacaaaaagtcttttgtttgtgaacactgatgcaagaaacttgttaaatgaaaggactctttaccctagaaggaagaggtgaaggatctggcttgtttttaaagctttatttattaaaccatattatttgattactgtgttagaatttcataagcaataattaaatgtgtctttatagatattgcaggaatgtatacatattgtgattaatgctttcaaaacttatgaaaatcatgaactaccccagaattgaactgttgtacttccaaagagaattgggctgtttataatgattttaatagagaaagatcccagggatcggtcataattggtcttgtttgataatgtgggcatccacaaacaaacaaacaaataacagaaacaaaatctgtaaatgttcctttgtaaaacttgtaaattttatttatactgtcttgttttgtacacacatttctctgtagtgggctctgaatacattgaaaatgcactatatttttctattttacttgcagagcatcacaaaagaacaggtattttcagtgctacataatgtgttttcccacatttaggaccaaagacggctatagaaaaactcaaatggattgcttcccaaacccctccccaccctttttttttggttttaaatcactgtacagtgttatttgatattttaatttattttttgattgactagaaaaatcattttaatttcactaaaatgttttttgtccctaaggaaaagtaatctgtaaaaataattttaattagcataatacagtcacctagacacttccatttgtaatctttgtaatagactgtaaatatatttttggaactataaaaaaaaaaaaaaaa

SEQ ID NO: 365 - DNA, 3865 bp, Homo Sapiens
  ref <308>: DATABASE ACCESSION NUMBER: GenBank No. NM004441
  ref <309>: DATABASE ENTRY DATE: 2004-11-15
cacatgcacacccacacccacgcgcgcccgcaccgccccacgcgcacacactcctgcccacgcccacgcagcgctccgggaagtccggtccgggcgagagcgcgaaaggataccgagaagccacccgcggagagcgcagcggcgccctgggacgcggcgctctcccggcgctgctgcctcggcttggtctcggcctgcgggccgtcggccggcgatggccctggattatctactactgctcctcctggcatccgcagtggctgcgatggaagaaacgttaatggacaccagaacggctactgcagagctgggctggacggccaatcctgcgtccgggtgggaagaagtcagtggctacgatgaaaacctgaacaccatccgcacctaccaggtgtgcaatgtcttcgagcccaaccagaacaattggctgctcaccaccttcatcaaccggcggggggcccatcgcatctacacagagatgcgcttcactgtgagagactgcagcagcctccctaatgtcccaggatcctgcaaggagaccttcaacttgtattactatgagactgactctgtcattgccaccaagaagtcagccttctggtctgaggccccctacctcaaagtagacaccattgctgcagatgagagcttctcccaggtggactttgggggaaggctgatgaaggtaaacacagaagtcaggagctttgggcctcttactcggaatggtttttacctcgcttttcaggattatggagcctgtatgtctcttctttctgtccgtgtcttcttcaaaaagtgtcccagcattgtgcaaaattttgcagtgtttccagagactatgacaggggcagagagcacatctctggtgattgctcggggcacatgcatccccaacgcagaggaagtggacgtgcccatcaaactctactgcaacggggatggggaatggatggtgcctattgggcgatgcacctgcaagcctggctatgagcctgagaacagcgtggcatgcaaggcttgccctgcagggacattcaaggccagccaggaagctgaaggctgctcccactgcccctccaacagccgctcccctgcagaggcgtctcccatctgcacctgtcggaccggttattaccgagcggactttgaccctccagaagtggcatgcactagcgtcccatcaggtccccgcaatgttatctccatcgtcaatgagacgtccatcattctggagtggcaccctccaagggagacaggtgggcgggatgatgtgacctacaacatcatctgcaaaaagtgccgggcagaccgccggagctgctcccgctgtgacgacaatgtggagtttgtgcccaggcagctgggcctgacggagtgccgcgtctccatcagcagcctgtgggcccacaccccctacacctttgacatccaggccatcaatggagtctccagcaagagtcccttccccccacagcacgtctctgtcaacatcaccacaaaccaagccgccccctccaccgttcccatcatgcaccaagtcagtgccactatgaggagcatcaccttgtcatggccacagccggagcagcccaatggcatcatcctggactatgagatccggtactatgagaaggaacacaatgagttcaactcctccatggccaggagtcagaccaacacagcaaggattgatgggctgcggcctggcatggtatatgtggtacaggtgcgtgcccgcactgttgctggctacggcaagttcagtggcaagatgtgcttccagactctgactgacgatgattacaagtcagagctgagggagcagctgcccctgattgctggctcggcagcggccggggtcgtgttcgttgtgtccttggtggccatctctatcgtctgtagcaggaaacgggcttatagcaaagaggctgtgtacagcgataagctccagcattacagcacaggccgaggctccccagggatgaagatctacattgaccccttcacttatgaggatcccaacgaagctgtccgggagtttgccaaggagattgatgtatcttttgtgaaaattgaagaggtcatcggagcaggggagtttggagaagtgtacaaggggcgtttgaaactgccaggcaagagggaaatctacgtggccatcaagaccctgaaggcagggtactcggagaagcagcgtcgggactttctgagtgaggcgagcatcatgggccagttcgaccatcctaacatcattcgcctggagggtgtggtcaccaagagtcggcctgtcatgatcatcacagagttcatggagaatggtgcattggattctttcctcaggcaaaatgacgggcagttcaccgtgatccagcttgtgggtatgctcaggggcatcgctgctggcatgaagtacctggctgagatgaattatgtgcatcgggacctggctgctaggaacattctggtcaacagtaacctggtgtgcaaggtgtccgactttggcctctcccgctacctccaggatgacacctcagatcccacctacaccagctccttgggagggaagatccctgtgagatggacagctccagaggccatcgcctaccgcaagttcacttcagccagcgacgtttggagctatgggatcgtcatgtgggaagtcatgtcatttggagagagaccctattgggatatgtccaaccaagatgtcatcaatgccatcgagcaggactaccggctgcccccacccatggactgtccagctgctctacaccagctcatgctggactgttggcagaaggaccggaacagccggccccggtttgcggagattgtcaacaccctagataagatgatccggaacccggcaagtctcaagactgtggcaaccatcaccgccgtgccttcccagcccctgctcgaccgctccatcccagacttcacggcctttaccaccgtggatgactggctcagcgccatcaaaatggtccagtacagggacagcttcctcactgctggcttcacctccctccagctggtcacccagatgacatcagaagacctcctgagaataggcatcaccttggcaggccatcagaagaagatcctgaacagcattcattctatgagggtccagataagtcagtcaccaacggcaatggcatgagaactcttgtttcttggggaaggagaggagggaaaaggaccagggtcaagggggaccagaggttgaccactgtggaatgtactggagagactggcttctcagctgaggaatgcatttccatcagtgaagaatcaaccggacctgttgctagcaggcaatctccatttctcagtgacagaagcatgtttgagatgccgtgggaaaccaaatatataataataaaaatataaaaaggtgatgttcaacagaagtgaagacaaaacaatatgcatcaggagaacaagagtaaacccagctcccactctcagtgggctgcagttgcccaaccacaggaagaaagggaaggaggtagagggaagaaacagaagcagtgttccattttcttcctcaccaatgacattcttttcttttctcctttcgtactcctccctgagagtcccctcccttctcccacactcgtttccctttgctcatgactcctgtagggaagtttcttcaaacaaaacccagctcctgagtctccagatgttgttctgtcagttgccaaaggactttgctgaccactgcatggggatccaaccaattcaattaatgtcttcatattgaagaagagatgtaccttcaattgaaaacctcgtttttcttttgtttgcattttctgcaaaaaggaaaaagaaaccacaaattggggaattc

SEQ ID NO: 366 - DNA, 3949 bp, Homo sapiens
  ref <308>: DATABASE ACCESSION NUMBER: GenBank No. AF025304
  ref <309>: DATABASE ENTRY DATE: 2000-11-29
gaattccgccccgggaagcgcagccatggctctgcggaggctgggggccgcgctgctgctgctgccgctgctcgccgccgtggaagaaacgctaatggactccactacagcgactgctgagctgggctggatggtgcatcctccatcagggtgggaagaggtgagtggctacgatgagaacatgaacacgatccgcacgtaccaggtgtgcaacgtgtttgagtcaagccagaacaactggctacggaccaagtttatccggcgccgtggcgcccaccgcatccacgtggagatgaagttttcggtgcgtgactgcagcagcatccccagcgtgcctggctcctgcaaggagaccttcaacctctattactatgaggctgactttgactcggccaccaagaccttccccaactggatggagaatccatgggtgaaggtggataccattgcagccgacgagagcttctcccaggtggacctgggtggccgcgtcatgaaaatcaacaccgaggtgcggagcttcggacctgtgtcccgcagcggcttctacctggccttccaggactatggcggctgcatgtccctcatcgccgtgcgtgtcttctaccgcaagtgcccccgcatcatccagaatggcgccatcttccaggaaaccctgtcgggggctgagagcacatcgctggtggctgcccggggcagctgcatcgccaatgcggaagaggtggatgtacccatcaagctctactgtaacggggacggcgagtggctggtgcccatcgggcgctgcatgtgcaaagcaggcttcgaggccgttgagaatggcaccgtctgccgaggttgtccatctgggactttcaaggccaaccaaggggatgaggcctgtacccactgtcccatcaacagccggaccacttctgaaggggccaccaactgtgtctgccgcaatggctactacagagcagacctggaccccctggacatgccctgcacaaccatcccctccgcgccccaggctgtgatttccagtgtcaatgagacctccctcatgctggagtggacccctccccgcgactccggaggccgagaggacctcgtctacaacatcatctgcaagagctgtggctcgggccggggtgcctgcacccgctgcggggacaatgtacagtacgcaccacgccagctaggcctgaccgagccacgcatttacatcagtgacctgctggcccacacccagtacaccttcgagatccaggctgtgaacggcgttactgaccagagccccttctcgcctcagttcgcctctgtgaacatcaccaccaaccaggcagctccatcggcagtgtccatcatgcatcaggtgagccgcaccgtggacagcattaccctgtcgtggtcccagccagaccagcccaatggcgtgatcctggactatgagctgcagtactatgagaaggagctcagtgagtacaacgccacagccataaaaagccccaccaacacggtcaccgtgcagggcctcaaagccggcgccatctatgtcttccaggtgcgggcacgcaccgtggcaggctacgggcgctacagcggcaagatgtacttccagaccatgacagaagccgagtaccagacaagcatccaggagaagttgccactcatcatcggctcctcggccgctggcctggtcttcctcattgctgtggttgtcatcgccatcgtgtgtaacagacgggggtttgagcgtgctgactcggagtacacggacaagctgcaacactacaccagtggccacatgaccccaggcatgaagatctacatcgatcctttcacctacgaggaccccaacgaggcagtgcgggagtttgccaaggaaattgacatctcctgtgtcaaaattgagcaggtgatcggagcaggggagtttggcgaggtctgcagtggccacctgaagctgccaggcaagagagagatctttgtggccatcaagacgctcaagtcgggctacacggagaagcagcgccgggacttcctgagcgaagcctccatcatgggccagttcgaccatcccaacgtcatccacctggagggtgtcgtgaccaagagcacacctgtgatgatcatcaccgagttcatggagaatggctccctggactcctttctccggcaaaacgatgggcagttcacagtcatccagctggtgggcatgcttcggggcatcgcagctggcatgaagtacctggcagacatgaactatgttcaccgtgacctggctgcccgcaacatcctcgtcaacagcaacctggtctgcaaggtgtcggactttgggctctcacgctttctagaggacgatacctcagaccccacctacaccagtgccctgggcggaaagatccccatccgctggacagccccggaagccatccagtaccggaagttcacctcggccagtgatgtgtggagctacggcattgtcatgtgggaggtgatgtcctatggggagcggccctactgggacatgaccaaccaggatgtaatcaatgccattgagcaggactatcggctgccaccgcccatggactgcccgagcgccctgcaccaactcatgctggactgttggcagaaggaccgcaaccaccggcccaagttcggccaaattgtcaacacgctagacaagatgatccgcaatcccaacagcctcaaagccatggcgcccctctcctctggcatcaacctgccgctgctggaccgcacgatccccgactacaccagctttaacacggtggacgagtggctggaggccatcaagatggggcagtacaaggagagcttcgccaatgccggcttcacctcctttgacgtcgtgtctcagatgatgatggaggacattctccgggttggggtcactttggctggccaccagaaaaaaatcctgaacagtatccaggtgatgcgggcgcagatgaaccagattcagtctgtggagggccagccactcgccaggaggccacgggccacgggaagaaccaagcggtgccagccacgagacgtcaccaagaaaacatgcaactcaaacgacggaaaaaaaaagggaatgggaaaaaagaaaacagatcctgggagggggcgggaaatacaaggaatattttttaaagaggattctcataaggaaagcaatgactgttcttgcgggggataaaaaagggcttgggagattcatgcgatgtgtccaatcggagacaaaagcagtttctctccaactccctctgggaaggtgacctggccagagccaagaaacactttcagaaaaacaaatgtgaaggggagagacaggggccacccttggctcctgtccctgctgctcctctaggcctcactcaacaaccaagcgcctggaggacgggacagatggacagacagccaccctgagaacccctctgggaaaatctattcctgccaccactgggcaaacagaagaatttttctgtctttggagagtattttagaaactccaatgaaagacactgtttctcctgttggctcacagggctgaaaggggcttttgtcctcctgggtcagggagaacgcggggaccccagaaaggtcagccttcctgaggatgggcaacccccaggtctgcagctccaggtacatatcacgcgcacagcctggcagcctggccctcctggtgcccactcccgccagcccctgcctcgaggactgatactgcagtgactgccgtcagctccgactgccgctgagaagggttgatcctgcatctgggtttgtttacagcaattcctggactcgggggtattttggtcacagggtggttttggtttagggggtttgtttgttgggttgttttttgttttttggttttttttaatgacaatgaagtgacactttgacatttccaaaaaaaaaaaaaaaaaaaaaaaaaaaaaaaaaaaaa

SEQ ID NO: 367 - DNA, 4234 bp, Homo sapiens
  ref <308>: DATABASE ACCESSION NUMBER: GenBank No. NM004443
  ref <309>: DATABASE ENTRY DATE: 2004-11-16
cgtgagcggcgcagcaagatcccagctcggaccccggacggcgcgcgcccccgaagccccggatcccagtcgggcccgcagctgaccgccagattactgtgcatcccgaatcacgaccacctgcaccctcctgccccggcccgccccccaagtcctcaggcacccagctccccggcgccccggatcctcctggaccggtccgtccagattcccgcgggaccgacctgtccgcatccccaggaccgccgggctcggtgcaccgcctcggtcccggagccgcccgcctggattgcattccctcctctcctggatctcctgggacccgacgcgagcctgccccggagcccgccgagcgcaccctctctcgggtgcctgcagccccgccggcgcggcccggcccggcgcggcccggctcggctcctagagctgccacggccatggccagagcccgcccgccgccgccgccgtcgccgccgccggggcttctgccgctgctccctccgctgctgctgctgccgctgctgctgctgcccgccggctgccgggcgctggaagagaccctcatggacacaaaatgggtaacatctgagttggcgtggacatctcatccagaaagtgggtgggaagaggtgagtggctacgatgaggccatgaatcccatccgcacataccaggtgtgtaatgtgcgcgagtcaagccagaacaactggcttcgcacggggttcatctggcggcgggatgtgcagcgggtctacgtggagctcaagttcactgtgcgtgactgcaacagcatccccaacatccccggctcctgcaaggagaccttcaacctcttctactacgaggctgacagcgatgtggcctcagcctcctcccccttctggatggagaacccctacgtgaaagtggacaccattgcacccgatgagagcttctcgcggctggatgccggccgtgtcaacaccaaggtgcgcagctttgggccactttccaaggctggcttctacctggccttccaggaccagggcgcctgcatgtcgctcatctccgtgcgcgccttctacaagaagtgtgcatccaccaccgcaggcttcgcactcttccccgagaccctcactggggcggagcccacctcgctggtcattgctcctggcacctgcatccctaacgccgtggaggtgtcggtgccactcaagctctactgcaacggcgatggggagtggatggtgcctgtgggtgcctgcacctgtgccaccggccatgagccagctgccaaggagtcccagtgccgcccctgtccccctgggagctacaaggcgaagcagggagaggggccctgcctcccatgtccccccaacagccgtaccacctccccagccgccagcatctgcacctgccacaataacttctaccgtgcagactcggactctgcggacagtgcctgtaccaccgtgccatctccaccccgaggtgtgatctccaatgtgaatgaaacctcactgatcctcgagtggagtgagccccgggacctgggtggccgggatgacctcctgtacaatgtcatctgcaagaagtgccatggggctggaggggcctcagcctgctcacgctgtgatgacaacgtggagtttgtgcctcggcagctgggcctgacggagcgccgggtccacatcagccatctgctggcccacacgcgctacacctttgaggtgcaggcggtcaacggtgtctcgggcaagagccctctgccgcctcgttatgcggccgtgaatatcaccacaaaccaggctgccccgtctgaagtgcccacactacgcctgcacagcagctcaggcagcagcctcaccctatcctgggcacccccagagcggcccaacggagtcatcctggactacgagatgaagtactttgagaagagcgagggcatcgcctccacagtgaccagccagatgaactccgtgcagctggacgggcttcggcctgacgcccgctatgtggtccaggtccgtgcccgcacagtagctggctatgggcagtacagccgccctgccgagtttgagaccacaagtgagagaggctctggggcccagcagctccaggagcagcttcccctcatcgtgggctccgctacagctgggcttgtcttcgtggtggctgtcgtggtcatcgctatcgtctgcctcaggaagcagcgacacggctctgattcggagtacacggagaagctgcagcagtacattgctcctggaatgaaggtttatattgacccttttacctacgaggaccctaatgaggctgttcgggagtttgccaaggagatcgacgtgtcctgcgtcaagatcgaggaggtgatcggagctggggaatttggggaagtgtgccgtggtcgactgaaacagcctggccgccgagaggtgtttgtggccatcaagacgctgaaggtgggctacaccgagaggcagcggcgggacttcctaagcgaggcctccatcatgggtcagtttgatcaccccaatataatccggctcgagggcgtggtcaccaaaagtcggccagttatgatcctcactgagttcatggaaaactgcgccctggactccttcctccggctcaacgatgggcagttcacggtcatccagctggtgggcatgttgcggggcattgctgccggcatgaagtacctgtccgagatgaactatgtgcaccgcgacctggctgctcgcaacatccttgtcaacagcaacctggtctgcaaagtctcagactttggcctctcccgcttcctggaggatgacccctccgatcctacctacaccagttccctgggcgggaagatccccatccgctggactgccccagaggccatagcctatcggaagttcacttctgctagtgatgtctggagctacggaattgtcatgtgggaggtcatgagctatggagagcgaccctactgggacatgagcaaccaggatgtcatcaatgccgtggagcaggattaccggctgccaccacccatggactgtcccacagcactgcaccagctcatgctggactgctgggtgcgggaccggaacctcaggcccaaattctcccagattgtcaataccctggacaagctcatccgcaatgctgccagcctcaaggtcattgccagcgctcagtctggcatgtcacagcccctcctggaccgcacggtcccagattacacaaccttcacgacagttggtgattggctggatgccatcaagatggggcggtacaaggagagcttcgtcagtgcggggtttgcatcttttgacctggtggcccagatgacggcagaagacctgctccgtattggggtcaccctggccggccaccagaagaagatcctgagcagtatccaggacatgcggctgcagatgaaccagacgctgcctgtgcaggtctgacaccggctcccacggggaccctgaggaccgtgcagggatgccaagcagccggctggactttcggactcttggacttttggatgcctggccttaggctgtggcccagaagctggaagtttgggaaaggcccaagctgggacttctccaggcctgtgttccctccccaggaagtgcgccccaaacctcttcatattgaagatggattaggagagggggtgatgacccctccccaagcccctcagggcccagaccttcctgctctccagcaggggatccccacaacctcacacttgtctgttcttcagtgctggaggtcctggcagggtcaggctggggtaagccggggttccacagggcccagccctggcaggggtctggccccccaggtaggcggagagcagtccctccctcaggaactggaggaggggactccaggaatggggaaatgtgacaccaccatcctgaagccagcttgcacctccagtttgcacagggatttgttctgggggctgagggccctgtccccacccccgcccttggtgctgtcataaaagggcaggcaggggcaggctgaggagttgccctttgccccccagagactgactctcagagccagagatgggatgtgtgagtgtgtgtgtgtgtgtgtgtgtgtgcgcgcgcgcgcgcgtgtgtgtgtgcacgcactggcctgcacagagagcatgggtgagcgtgtaaaagcttggccctgtgccctacaatggggccagctgggccgacagcagaataaaggcaataagatgaaaaaaaaaaaaaaa

SEQ ID NO: 368 - DNA, 4369 bp, Homo sapiens
  ref <308>: DATABASE ACCESSION NUMBER: GenBank No. NM004444
  ref <309>: DATABASE ENTRY DATE: 2004-11-16
ttccagcgcagctcagcccctgcccggcccggcccgcccggctccgcgccgcagtctccctccctcccgctccgtccccgctcgggctcccaccatccccgcccgcgaggagagcactcggcccggcggcgcgagcagagccactccagggagggggggagaccgcgagcggccggctcagcccccgccacccggggcgggaccccgaggccccggagggaccccaactccagccacgtcttgctgcgcgcccgcccggcgcggccactgccagcacgctccgggcccgccgcccgcgcgcgcggcacagacgcggggccacacttggcgccgccgcccggtgccccgcacgctcgcatgggcccgcgctgagggccccgacgaggagtcccgcgcggagtatcggcgtccacccgcccagggagagtcagacctgggggggcgagggccccccaaactcagttcggatcctacccgagtgaggcggcgccatggagctccgggtgctgctctgctgggcttcgttggccgcagctttggaagagaccctgctgaacacaaaattggaaactgctgatctgaagtgggtgacattccctcaggtggacgggcagtgggaggaactgagcggcctggatgaggaacagcacagcgtgcgcacctacgaagtgtgtgacgtgcagcgtgccccgggccaggcccactggcttcgcacaggttgggtcccacggcggggcgccgtccacgtgtacgccacgctgcgcttcaccatgctcgagtgcctgtccctgcctcgggctgggcgctcctgcaaggagaccttcaccgtcttctactatgagagcgatgcggacacggccacggccctcacgccagcctggatggagaacccctacatcaaggtggacacggtggccgcggagcatctcacccggaagcgccctggggccgaggccaccgggaaggtgaatgtcaagacgctgcgtctgggaccgctcagcaaggctggcttctacctggccttccaggaccagggtgcctgcatggccctgctatccctgcacctcttctacaaaaagtgcgcccagctgactgtgaacctgactcgattcccggagactgtgcctcgggagctggttgtgcccgtggccggtagctgcgtggtggatgccgtccccgcccctggccccagccccagcctctactgccgtgaggatggccagtgggccgaacagccggtcacgggctgcagctgtgctccggggttcgaggcagctgaggggaacaccaagtgccgagcctgtgcccagggcaccttcaagcccctgtcaggagaagggtcctgccagccatgcccagccaatagccactctaacaccattggatcagccgtctgccagtgccgcgtcgggtacttccgggcacgcacagacccccggggtgcaccctgcaccacccctccttcggctccgcggagcgtggtttcccgcctgaacggctcctccctgcacctggaatggagtgcccccctggagtctggtggccgagaggacctcacctacgccctccgctgccgggagtgccgacccggaggctcctgtgcgccctgcgggggagacctgacttttgaccccggcccccgggacctggtggagccctgggtggtggttcgagggctacgtcctgacttcacctatacctttgaggtcactgcattgaacggggtatcctccttagccacggggcccgtcccatttgagcctgtcaatgtcaccactgaccgagaggtacctcctgcagtgtctgacatccgggtgacgcggtcctcacccagcagcttgagcctggcctgggctgttccccgggcacccagtggggctgtgctggactacgaggtcaaataccatgagaagggcgccgagggtcccagcagcgtgcggttcctgaagacgtcagaaaaccgggcagagctgcgggggctgaagcggggagccagctacctggtgcaggtacgggcgcgctctgaggccggctacgggcccttcggccaggaacatcacagccagacccaactggatgagagcgagggctggcgggagcagctggccctgattgcgggcacggcagtcgtgggtgtggtcctggtcctggtggtcattgtggtcgcagttctctgcctcaggaagcagagcaatgggagagaagcagaatattcggacaaacacggacagtatctcatcggacatggtactaaggtctacatcgaccccttcacttatgaagaccctaatgaggctgtgagggaatttgcaaaagagatcgatgtctcctacgtcaagattgaagaggtgattggtgcaggtgagtttggcgaggtgtgccgggggcggctcaaggccccagggaagaaggagagctgtgtggcaatcaagaccctgaagggtggctacacggagcggcagcggcgtgagtttctgagcgaggcctccatcatgggccagttcgagcaccccaatatcatccgcctggagggcgtggtcaccaacagcatgcccgtcatgattctcacagagttcatggagaacggcgccctggactccttcctgcggctaaacgacggacagttcacagtcatccagctcgtgggcatgctgcggggcatcgcctcgggcatgcggtaccttgccgagatgagctacgtccaccgagacctggctgctcgcaacatcctagtcaacagcaacctcgtctgcaaagtgtctgactttggcctttcccgattcctggaggagaactcttccgatcccacctacacgagctccctgggaggaaagattcccatccgatggactgccccggaggccattgccttccggaagttcacttccgccagtgatgcctggagttacgggattgtgatgtgggaggtgatgtcatttggggagaggccgtactgggacatgagcaatcaggacgtgatcaatgccattgaacaggactaccggctgcccccgcccccagactgtcccacctccctccaccagctcatgctggactgttggcagaaagaccggaatgcccggccccgcttcccccaggtggtcagcgccctggacaagatgatccggaaccccgccagcctcaaaatcgtggcccgggagaatggcggggcctcacaccctctcctggaccagcggcagcctcactactcagcttttggctctgtgggcgagtggcttcgggccatcaaaatgggaagatacgaagaaagtttcgcagccgctggctttggctccttcgagctggtcagccagatctctgctgaggacctgctccgaatcggagtcactctggcgggacaccagaagaaaatcttggccagtgtccagcacatgaagtcccaggccaagccgggaaccccgggtgggacaggaggaccggccccgcagtactgacctgcaggaactccccaccccagggacaccgcctccccattttccggggcagagtggggactcacagaggcccccagccctgtgccccgctggattgcactttgagcccgtggggtgaggagttggcaatttggagagacaggatttgggggttctgccataataggaggggaaaatcaccccccagccacctcggggaactccagaccaagggtgagggcgcctttccctcaggactgggtgtgaccagaggaaaaggaagtgcccaacatctcccagcctccccaggtgcccccctcaccttgatgggtgcgttcccgcagaccaaagagagtgtgactcccttgccagctccagagtgggggggctgtcccagggggcaagaaggggtgtcagggcccagtgacaaaatcattggggtttgtagtcccaacttgctgctgtcaccaccaaactcaatcatttttttcccttgtaaatgcccctcccccagctgctgccttcatattgaaggtttttgagttttgtttttggtcttaatttttctccccgttccctttttgtttcttcgttttgtttttctaccgtccttgtcataactttgtgttggagggaacctgtttcactatggcctcctttgcccaagttgaaacaggggcccatcatcatgtctgtttccagaacagtgccttggtcatcccacatccccggaccccgcctgggacccccaagctgtgtcctatgaaggggtgtggggtgaggtagtgaaaagggcggtagttggtggtggaacccagaaacggacgccggtgcttggaggggttcttaaattatatttaaaaaagtaactttttgtataaataaaagaaaatgggacgtgtcccagctccaggggtaaaaaaaaaaaaaaaaaa

SEQ ID NO: 369 - DNA, 4059 bp, Homo sapiens
  ref <308>: DATABASE ACCESSION NUMBER: GenBank No. NM004445
  ref <309>: DATABASE ENTRY DATE: 2004-11-29
ggggcgggccgggccggcttgggaggggacgcggagggggcgggccgggctgcgttcgctccagccgcggctctacagcagcgggcggcgggacccgggacccagcttggcgacggcgatctcgacgcgggcccccaggatctcccggcgccccacctctggagcagcccctgccgccagcgtcaggtccaccccggaatcccagggactctcggcgccgaacggacccgggccgggtgcaacggggtccccggactggagaagacgcgggtggcaccgtgcgagctccaggagccccgggtccactgcgaggcctcggggggcgcagacctgcagagactgcggccaacgggaagaaataaagggattatagtccacccaattcacagacttctgagactcagacacgaggagagatagagaaccgccaatctctagatcaacaagcaaaggaggtgccaagcctgtttgtcttcattgtgacactggagtctagatgctgggaagtccaagatcagggtgccggcatggtcagttcctggcgaagcctctcttctaggtttcagactgccctcttctttgttgtgtcctcgaatggcagaaaaaggggtggctgttggaggaagggaggagagtaaatgaagagaaagaactggaataaccccttgcagaaaaaaaaaaaaagggaagcaagcttagctgtacaccctgagtcttgcaaaagctgcagccccacccaggagcagggtggtggctggggcgatggtggacgccctgaagatgtcccatggctactgaaggggctgcccagttagggaacagagtggcgggcatggtgtgtagcctatgggtgctgctcctggtgtcttcagttctggctctggaagaggtattgctggacaccaccggagagacatctgagattggctggctcacctacccaccaggggggtgggacgaggtgagtgttctggacgaccagcgacgcctgactcggacctttgaggcatgtcatgtggcaggggcccctccaggcaccgggcaggacaattggttgcagacacactttgtggagcggcgcggggcccagagggcgcacattcgactccacttctctgtgcgggcatgctccagcctgggtgtgagcggcggcacctgccgggagaccttcaccctttactaccgtcaggctgaggagcccgacagccctgacagcgtttcctcctggcacctcaaacgctggaccaaggtggacacaattgcagcagacgagagctttccctcctcctcctcctcctcctcctcttcttcctctgcagcgtgggctgtgggaccccacggggctgggcagcgggctggactgcaactgaacgtcaaagagcggagctttgggcctctcacccaacgcggcttctacgtggccttccaggacacgggggcctgcctggccctggtcgctgtcaggctcttctcctacacctgccctgccgtgctccgatcctttgcttcctttccagagacgcaggccagtggggctgggggggcctccctggtggcagctgtgggcacctgtgtggctcatgcagagccagaggaggatggagtagggggccaggcaggaggcagcccccccaggctgcactgcaacggggagggcaagtggatggtagctgtcgggggctgccgctgccagcctggataccaaccagcacgaggagacaaggcctgccaagcctgcccacgggggctctataagtcttctgctgggaatgctccctgctcaccatgccctgcccgcagtcacgctcccaacccagcagcccccgtttgcccctgcctggagggcttctaccgggccagttccgacccaccagaggccccctgcactggtcctccatcggctccccaggagctttggtttgaggtgcaaggctcagcactcatgctacactggcgcctgcctcgggagctggggggtcgaggggacctgctcttcaatgtcgtgtgcaaggagtgtgaaggccgccaggaacctgccagcggtggtgggggcacttgtcaccgctgcagggatgaggtccacttcgaccctcgccagagaggcctgactgagagccgagtgttagtggggggactccgggcacacgtaccctacatcttagaggtgcaggctgttaatggggtgtctgagctcagccctgaccctcctcaggctgcagccatcaatgtcagcaccagccatgaagtgccctctgctgtccctgtggtgcaccaggtgagccgggcatccaacagcatcacggtgtcctggccgcagcccgaccagaccaatgggaacatcctggactatcagctccgctactatgaccaggcagaagacgaatcccactccttcaccctgaccagcgagaccaacactgccaccgtgacacagctgagccctggccacatctatggtttccaggtgcgggcccggactgctgccggccacggcccctacgggggcaaagtctatttccagacacttcctcaaggggagctgtcttcccagcttccggaaagactctccttggtgatcggctccatcctgggggctttggccttcctcctgctggcagccatcaccgtgctggcggtcgtcttccagcggaagcggcgtgggactggctacacggagcagctgcagcaatacagcagcccaggactcggggtgaagtattacatcgacccctccacctacgaggacccctgtcaggccatccgagaacttgcccgggaagtcgatcctgcttatatcaagattgaggaggtcattgggacaggctcttttggagaagtgcgccagggccgcctgcagccacggggacggagggagcagactgtggccatccaggccctgtgggccgggggcgccgaaagcctgcagatgaccttcctgggccgggccgcagtgctgggtcagttccagcaccccaacatcctgcggctggagggcgtggtcaccaagagccgacccctcatggtgctgacggagttcatggagcttggccccctggacagcttcctcaggcagcgggagggccagttcagcagcctgcagctggtggccatgcagcggggagtggctgctgccatgcagtacctgtccagctttgccttcgtccatcgctcgctgtctgcccacagcgtgctggtgaatagccacttggtgtgcaaggtggcccgtcttggccacagtcctcagggcccaagttgtttgcttcgctgggcagccccagaggtcattgcacatggaaagcatacaacatccagtgatgtctggagctttgggatactcatgtgggaagtgatgagttatggagaacggccttactgggacatgagtgagcaggaggtactaaatgcaatagagcaggagttccggctgcccccgcctccaggctgtcctcctggattacatctacttatgttggacacttggcagaaggaccgtgcccggcggcctcattttgaccagctggtggctgcatttgacaagatgatccgcaagccagataccctgcaggctggcggggacccaggggaaaggccttcccaggcccttctgacccctgtggccctggactttccttgtctggactcaccccaggcctggctttcagccattggactggagtgctaccaggacaacttctccaagtttggcctctgtaccttcagtgatgtggctcagctcagcctagaagacctgcctgccctgggcatcaccctggctggccaccagaagaagctgctgcaccacatccagctccttcagcaacacctgaggcagcagggctcagtggaggtctgagaatgacgatacccgtgactcagccctggacactggtccgagaagggacatgtgggacgtgagccgggctccaacagcctctgtgagagatgccccacaccaaacccaaccctcccgatggctgcattccctggtcctccgcctctccaccagccccctcctcattaaagggaaagaagggaatttgcaaaaaaaaaaaaaaaaaa

SEQ ID NO: 370 - DNA, 5616 bp, Homo sapiens
  ref <308>: DATABASE ACCESSION NUMBER: GenBank No. NM005228
  ref <309>: DATABASE ENTRY DATE: 2005-01-26
ccccggcgcagcgcggccgcagcagcctccgccccccgcacggtgtgagcgcccgacgcggccgaggcggccggagtcccgagctagccccggcggccgccgccgcccagaccggacgacaggccacctcgtcggcgtccgcccgagtccccgcctcgccgccaacgccacaaccaccgcgcacggccccctgactccgtccagtattgatcgggagagccggagcgagctcttcggggagcagcgatgcgaccctccgggacggccggggcagcgctcctggcgctgctggctgcgctctgcccggcgagtcgggctctggaggaaaagaaagtttgccaaggcacgagtaacaagctcacgcagttgggcacttttgaagatcattttctcagcctccagaggatgttcaataactgtgaggtggtccttgggaatttggaaattacctatgtgcagaggaattatgatctttccttcttaaagaccatccaggaggtggctggttatgtcctcattgccctcaacacagtggagcgaattcctttggaaaacctgcagatcatcagaggaaatatgtactacgaaaattcctatgccttagcagtcttatctaactatgatgcaaataaaaccggactgaaggagctgcccatgagaaatttacaggaaatcctgcatggcgccgtgcggttcagcaacaaccctgccctgtgcaacgtggagagcatccagtggcgggacatagtcagcagtgactttctcagcaacatgtcgatggacttccagaaccacctgggcagctgccaaaagtgtgatccaagctgtcccaatgggagctgctggggtgcaggagaggagaactgccagaaactgaccaaaatcatctgtgcccagcagtgctccgggcgctgccgtggcaagtcccccagtgactgctgccacaaccagtgtgctgcaggctgcacaggcccccgggagagcgactgcctggtctgccgcaaattccgagacgaagccacgtgcaaggacacctgccccccactcatgctctacaaccccaccacgtaccagatggatgtgaaccccgagggcaaatacagctttggtgccacctgcgtgaagaagtgtccccgtaattatgtggtgacagatcacggctcgtgcgtccgagcctgtggggccgacagctatgagatggaggaagacggcgtccgcaagtgtaagaagtgcgaagggccttgccgcaaagtgtgtaacggaataggtattggtgaatttaaagactcactctccataaatgctacgaatattaaacacttcaaaaactgcacctccatcagtggcgatctccacatcctgccggtggcatttaggggtgactccttcacacatactcctcctctggatccacaggaactggatattctgaaaaccgtaaaggaaatcacagggtttttgctgattcaggcttggcctgaaaacaggacggacctccatgcctttgagaacctagaaatcatacgcggcaggaccaagcaacatggtcagttttctcttgcagtcgtcagcctgaacataacatccttgggattacgctccctcaaggagataagtgatggagatgtgataatttcaggaaacaaaaatttgtgctatgcaaatacaataaactggaaaaaactgtttgggacctccggtcagaaaaccaaaattataagcaacagaggtgaaaacagctgcaaggccacaggccaggtctgccatgccttgtgctcccccgagggctgctggggcccggagcccagggactgcgtctcttgccggaatgtcagccgaggcagggaatgcgtggacaagtgcaaccttctggagggtgagccaagggagtttgtggagaactctgagtgcatacagtgccacccagagtgcctgcctcaggccatgaacatcacctgcacaggacggggaccagacaactgtatccagtgtgcccactacattgacggcccccactgcgtcaagacctgcccggcaggagtcatgggagaaaacaacaccctggtctggaagtacgcagacgccggccatgtgtgccacctgtgccatccaaactgcacctacggatgcactgggccaggtcttgaaggctgtccaacgaatgggcctaagatcccgtccatcgccactgggatggtgggggccctcctcttgctgctggtggtggccctggggatcggcctcttcatgcgaaggcgccacatcgttcggaagcgcacgctgcggaggctgctgcaggagagggagcttgtggagcctcttacacccagtggagaagctcccaaccaagctctcttgaggatcttgaaggaaactgaattcaaaaagatcaaagtgctgggctccggtgcgttcggcacggtgtataagggactctggatcccagaaggtgagaaagttaaaattcccgtcgctatcaaggaattaagagaagcaacatctccgaaagccaacaaggaaatcctcgatgaagcctacgtgatggccagcgtggacaacccccacgtgtgccgcctgctgggcatctgcctcacctccaccgtgcagctcatcacgcagctcatgcccttcggctgcctcctggactatgtccgggaacacaaagacaatattggctcccagtacctgctcaactggtgtgtgcagatcgcaaagggcatgaactacttggaggaccgtcgcttggtgcaccgcgacctggcagccaggaacgtactggtgaaaacaccgcagcatgtcaagatcacagattttgggctggccaaactgctgggtgcggaagagaaagaataccatgcagaaggaggcaaagtgcctatcaagtggatggcattggaatcaattttacacagaatctatacccaccagagtgatgtctggagctacggggtgaccgtttgggagttgatgacctttggatccaagccatatgacggaatccctgccagcgagatctcctccatcctggagaaaggagaacgcctccctcagccacccatatgtaccatcgatgtctacatgatcatggtcaagtgctggatgatagacgcagatagtcgcccaaagttccgtgagttgatcatcgaattctccaaaatggcccgagacccccagcgctaccttgtcattcagggggatgaaagaatgcatttgccaagtcctacagactccaacttctaccgtgccctgatggatgaagaagacatggacgacgtggtggatgccgacgagtacctcatcccacagcagggcttcttcagcagcccctccacgtcacggactcccctcctgagctctctgagtgcaaccagcaacaattccaccgtggcttgcattgatagaaatgggctgcaaagctgtcccatcaaggaagacagcttcttgcagcgatacagctcagaccccacaggcgccttgactgaggacagcatagacgacaccttcctcccagtgcctgaatacataaaccagtccgttcccaaaaggcccgctggctctgtgcagaatcctgtctatcacaatcagcctctgaaccccgcgcccagcagagacccacactaccaggacccccacagcactgcagtgggcaaccccgagtatctcaacactgtccagcccacctgtgtcaacagcacattcgacagccctgcccactgggcccagaaaggcagccaccaaattagcctggacaaccctgactaccagcaggacttctttcccaaggaagccaagccaaatggcatctttaagggctccacagctgaaaatgcagaatacctaagggtcgcgccacaaagcagtgaatttattggagcatgaccacggaggatagtatgagccctaaaaatccagactctttcgatacccaggaccaagccacagcaggtcctccatcccaacagccatgcccgcattagctcttagacccacagactggttttgcaacgtttacaccgactagccaggaagtacttccacctcgggcacattttgggaagttgcattcctttgtcttcaaactgtgaagcatttacagaaacgcatccagcaagaatattgtccctttgagcagaaatttatctttcaaagaggtatatttgaaaaaaaaaaaaagtatatgtgaggatttttattgattggggatcttggagtttttcattgtcgctattgatttttacttcaatgggctcttccaacaaggaagaagcttgctggtagcacttgctaccctgagttcatccaggcccaactgtgagcaaggagcacaagccacaagtcttccagaggatgcttgattccagtggttctgcttcaaggcttccactgcaaaacactaaagatccaagaaggccttcatggccccagcaggccggatcggtactgtatcaagtcatggcaggtacagtaggataagccactctgtcccttcctgggcaaagaagaaacggaggggatggaattcttccttagacttacttttgtaaaaatgtccccacggtacttactccccactgatggaccagtggtttccagtcatgagcgttagactgacttgtttgtcttccattccattgttttgaaactcagtatgctgcccctgtcttgctgtcatgaaatcagcaagagaggatgacacatcaaataataactcggattccagcccacattggattcatcagcatttggaccaatagcccacagctgagaatgtggaatacctaaggatagcaccgcttttgttctcgcaaaaacgtatctcctaatttgaggctcagatgaaatgcatcaggtcctttggggcatagatcagaagactacaaaaatgaagctgctctgaaatctcctttagccatcaccccaaccccccaaaattagtttgtgttacttatggaagatagttttctccttttacttcacttcaaaagctttttactcaaagagtatatgttccctccaggtcagctgcccccaaaccccctccttacgctttgtcacacaaaaagtgtctctgccttgagtcatctattcaagcacttacagctctggccacaacagggcattttacaggtgcgaatgacagtagcattatgagtagtgtggaattcaggtagtaaatatgaaactagggtttgaaattgataatgctttcacaacatttgcagatgttttagaaggaaaaaagttccttcctaaaataatttctctacaattggaagattggaagattcagctagttaggagcccaccttttttcctaatctgtgtgtgccctgtaacctgactggttaacagcagtcctttgtaaacagtgttttaaactctcctagtcaatatccaccccatccaatttatcaaggaagaaatggttcagaaaatattttcagcctacagttatgttcagtcacacacacatacaaaatgttccttttgcttttaaagtaatttttgactcccagatcagtcagagcccctacagcattgttaagaaagtatttgatttttgtctcaatgaaaataaaactatattcatttccactctaaaaaaaaaaaaaaaaa

SEQ ID NO: 371 - DNA, 4624 bp, Homo sapiens
  ref <308>: DATABASE ACCESSION NUMBER: GenBank No. NM004448
  ref <309>: DATABASE ENTRY DATE: 2004-12-20
ggaggaggtggaggaggagggctgcttgaggaagtataagaatgaagttgtgaagctgagattcccctccattgggaccggagaaaccaggggagccccccgggcagccgcgcgccccttcccacggggccctttactgcgccgcgcgcccggcccccacccctcgcagcaccccgcgccccgcgccctcccagccgggtccagccggagccatggggccggagccgcagtgagcaccatggagctggcggccttgtgccgctgggggctcctcctcgccctcttgccccccggagccgcgagcacccaagtgtgcaccggcacagacatgaagctgcggctccctgccagtcccgagacccacctggacatgctccgccacctctaccagggctgccaggtggtgcagggaaacctggaactcacctacctgcccaccaatgccagcctgtccttcctgcaggatatccaggaggtgcagggctacgtgctcatcgctcacaaccaagtgaggcaggtcccactgcagaggctgcggattgtgcgaggcacccagctctttgaggacaactatgccctggccgtgctagacaatggagacccgctgaacaataccacccctgtcacaggggcctccccaggaggcctgcgggagctgcagcttcgaagcctcacagagatcttgaaaggaggggtcttgatccagcggaacccccagctctgctaccaggacacgattttgtggaaggacatcttccacaagaacaaccagctggctctcacactgatagacaccaaccgctctcgggcctgccacccctgttctccgatgtgtaagggctcccgctgctggggagagagttctgaggattgtcagagcctgacgcgcactgtctgtgccggtggctgtgcccgctgcaaggggccactgcccactgactgctgccatgagcagtgtgctgccggctgcacgggccccaagcactctgactgcctggcctgcctccacttcaaccacagtggcatctgtgagctgcactgcccagccctggtcacctacaacacagacacgtttgagtccatgcccaatcccgagggccggtatacattcggcgccagctgtgtgactgcctgtccctacaactacctttctacggacgtgggatcctgcaccctcgtctgccccctgcacaaccaagaggtgacagcagaggatggaacacagcggtgtgagaagtgcagcaagccctgtgcccgagtgtgctatggtctgggcatggagcacttgcgagaggtgagggcagttaccagtgccaatatccaggagtttgctggctgcaagaagatctttgggagcctggcatttctgccggagagctttgatggggacccagcctccaacactgccccgctccagccagagcagctccaagtgtttgagactctggaagagatcacaggttacctatacatctcagcatggccggacagcctgcctgacctcagcgtcttccagaacctgcaagtaatccggggacgaattctgcacaatggcgcctactcgctgaccctgcaagggctgggcatcagctggctggggctgcgctcactgagggaactgggcagtggactggccctcatccaccataacacccacctctgcttcgtgcacacggtgccctgggaccagctctttcggaacccgcaccaagctctgctccacactgccaaccggccagaggacgagtgtgtgggcgagggcctggcctgccaccagctgtgcgcccgagggcactgctggggtccagggcccacccagtgtgtcaactgcagccagttccttcggggccaggagtgcgtggaggaatgccgagtactgcaggggctccccagggagtatgtgaatgccaggcactgtttgccgtgccaccctgagtgtcagccccagaatggctcagtgacctgttttggaccggaggctgaccagtgtgtggcctgtgcccactataaggaccctcccttctgcgtggcccgctgccccagcggtgtgaaacctgacctctcctacatgcccatctggaagtttccagatgaggagggcgcatgccagccttgccccatcaactgcacccactcctgtgtggacctggatgacaagggctgccccgccgagcagagagccagccctctgacgtccatcatctctgcggtggttggcattctgctggtcgtggtcttgggggtggtctttgggatcctcatcaagcgacggcagcagaagatccggaagtacacgatgcggagactgctgcaggaaacggagctggtggagccgctgacacctagcggagcgatgcccaaccaggcgcagatgcggatcctgaaagagacggagctgaggaaggtgaaggtgcttggatctggcgcttttggcacagtctacaagggcatctggatccctgatggggagaatgtgaaaattccagtggccatcaaagtgttgagggaaaacacatcccccaaagccaacaaagaaatcttagacgaagcatacgtgatggctggtgtgggctccccatatgtctcccgccttctgggcatctgcctgacatccacggtgcagctggtgacacagcttatgccctatggctgcctcttagaccatgtccgggaaaaccgcggacgcctgggctcccaggacctgctgaactggtgtatgcagattgccaaggggatgagctacctggaggatgtgcggctcgtacacagggacttggccgctcggaacgtgctggtcaagagtcccaaccatgtcaaaattacagacttcgggctggctcggctgctggacattgacgagacagagtaccatgcagatgggggcaaggtgcccatcaagtggatggcgctggagtccattctccgccggcggttcacccaccagagtgatgtgtggagttatggtgtgactgtgtgggagctgatgacttttggggccaaaccttacgatgggatcccagcccgggagatccctgacctgctggaaaagggggagcggctgccccagccccccatctgcaccattgatgtctacatgatcatggtcaaatgttggatgattgactctgaatgtcggccaagattccgggagttggtgtctgaattctcccgcatggccagggacccccagcgctttgtggtcatccagaatgaggacttgggcccagccagtcccttggacagcaccttctaccgctcactgctggaggacgatgacatgggggacctggtggatgctgaggagtatctggtaccccagcagggcttcttctgtccagaccctgccccgggcgctgggggcatggtccaccacaggcaccgcagctcatctaccaggagtggcggtggggacctgacactagggctggagccctctgaagaggaggcccccaggtctccactggcaccctccgaaggggctggctccgatgtatttgatggtgacctgggaatgggggcagccaaggggctgcaaagcctccccacacatgaccccagccctctacagcggtacagtgaggaccccacagtacccctgccctctgagactgatggctacgttgcccccctgacctgcagcccccagcctgaatatgtgaaccagccagatgttcggccccagcccccttcgccccgagagggccctctgcctgctgcccgacctgctggtgccactctggaaaggcccaagactctctccccagggaagaatggggtcgtcaaagacgtttttgcctttgggggtgccgtggagaaccccgagtacttgacaccccagggaggagctgcccctcagccccaccctcctcctgccttcagcccagccttcgacaacctctattactgggaccaggacccaccagagcggggggctccacccagcaccttcaaagggacacctacggcagagaacccagagtacctgggtctggacgtgccagtgtgaaccagaaggccaagtccgcagaagccctgatgtgtcctcagggagcagggaaggcctgacttctgctggcatcaagaggtgggagggccctccgaccacttccaggggaacctgccatgccaggaacctgtcctaaggaaccttccttcctgcttgagttcccagatggctggaaggggtccagcctcgttggaagaggaacagcactggggagtctttgtggattctgaggccctgcccaatgagactctagggtccagtggatgccacagcccagcttggccctttccttccagatcctgggtactgaaagccttagggaagctggcctgagaggggaagcggccctaagggagtgtctaagaacaaaagcgacccattcagagactgtccctgaaacctagtactgccccccatgaggaaggaacagcaatggtgtcagtatccaggctttgtacagagtgcttttctgtttagtttttactttttttgttttgtttttttaaagatgaaataaagacccagggggagaatgggtgttgtatggggaggcaagtgtggggggtccttctccacacccactttgtccatttgcaaatatattttggaaaacagcta

SEQ ID NO: 372 - DNA, 5511 bp, Homo sapiens
  ref <308>: DATABASE ACCESSION NUMBER: GenBank No. NM001982
  ref <309>: DATABASE ENTRY DATE: 2004-12-20
acacacacacacccctcccctgccatccctccccggactccggctccggctccgattgcaatttgcaacctccgctgccgtcgccgcagcagccaccaattcgccagcggttcaggtggctcttgcctcgatgtcctagcctaggggcccccgggccggacttggctgggctcccttcaccctctgcggagtcatgagggcgaacgacgctctgcaggtgctgggcttgcttttcagcctggcccggggctccgaggtgggcaactctcaggcagtgtgtcctgggactctgaatggcctgagtgtgaccggcgatgctgagaaccaataccagacactgtacaagctctacgagaggtgtgaggtggtgatggggaaccttgagattgtgctcacgggacacaatgccgacctctccttcctgcagtggattcgagaagtgacaggctatgtcctcgtggccatgaatgaattctctactctaccattgcccaacctccgcgtggtgcgagggacccaggtctacgatgggaagtttgccatcttcgtcatgttgaactataacaccaactccagccacgctctgcgccagctccgcttgactcagctcaccgagattctgtcagggggtgtttatattgagaagaacgataagctttgtcacatggacacaattgactggagggacatcgtgagggaccgagatgctgagatagtggtgaaggacaatggcagaagctgtcccccctgtcatgaggtttgcaaggggcgatgctggggtcctggatcagaagactgccagacattgaccaagaccatctgtgctcctcagtgtaatggtcactgctttgggcccaaccccaaccagtgctgccatgatgagtgtgccgggggctgctcaggccctcaggacacagactgctttgcctgccggcacttcaatgacagtggagcctgtgtacctcgctgtccacagcctcttgtctacaacaagctaactttccagctggaacccaatccccacaccaagtatcagtatggaggagtttgtgtagccagctgtccccataactttgtggtggatcaaacatcctgtgtcagggcctgtcctcctgacaagatggaagtagataaaaatgggctcaagatgtgtgagccttgtgggggactatgtcccaaagcctgtgagggaacaggctctgggagccgcttccagactgtggactcgagcaacattgatggatttgtgaactgcaccaagatcctgggcaacctggactttctgatcaccggcctcaatggagacccctggcacaagatccctgccctggacccagagaagctcaatgtcttccggacagtacgggagatcacaggttacctgaacatccagtcctggccgccccacatgcacaacttcagtgttttttccaatttgacaaccattggaggcagaagcctctacaaccggggcttctcattgttgatcatgaagaacttgaatgtcacatctctgggcttccgatccctgaaggaaattagtgctgggcgtatctatataagtgccaataggcagctctgctaccaccactctttgaactggaccaaggtgcttcgggggcctacggaagagcgactagacatcaagcataatcggccgcgcagagactgcgtggcagagggcaaagtgtgtgacccactgtgctcctctgggggatgctggggcccaggccctggtcagtgcttgtcctgtcgaaattatagccgaggaggtgtctgtgtgacccactgcaactttctgaatggggagcctcgagaatttgcccatgaggccgaatgcttctcctgccacccggaatgccaacccatggagggcactgccacatgcaatggctcgggctctgatacttgtgctcaatgtgcccattttcgagatgggccccactgtgtgagcagctgcccccatggagtcctaggtgccaagggcccaatctacaagtacccagatgttcagaatgaatgtcggccctgccatgagaactgcacccaggggtgtaaaggaccagagcttcaagactgtttaggacaaacactggtgctgatcggcaaaacccatctgacaatggctttgacagtgatagcaggattggtagtgattttcatgatgctgggcggcacttttctctactggcgtgggcgccggattcagaataaaagggctatgaggcgatacttggaacggggtgagagcatagagcctctggaccccagtgagaaggctaacaaagtcttggccagaatcttcaaagagacagagctaaggaagcttaaagtgcttggctcgggtgtctttggaactgtgcacaaaggagtgtggatccctgagggtgaatcaatcaagattccagtctgcattaaagtcattgaggacaagagtggacggcagagttttcaagctgtgacagatcatatgctggccattggcagcctggaccatgcccacattgtaaggctgctgggactatgcccagggtcatctctgcagcttgtcactcaatatttgcctctgggttctctgctggatcatgtgagacaacaccggggggcactggggccacagctgctgctcaactggggagtacaaattgccaagggaatgtactaccttgaggaacatggtatggtgcatagaaacctggctgcccgaaacgtgctactcaagtcacccagtcaggttcaggtggcagattttggtgtggctgacctgctgcctcctgatgataagcagctgctatacagtgaggccaagactccaattaagtggatggcccttgagagtatccactttgggaaatacacacaccagagtgatgtctggagctatggtgtgacagtttgggagttgatgaccttcggggcagagccctatgcagggctacgattggctgaagtaccagacctgctagagaagggggagcggttggcacagccccagatctgcacaattgatgtctacatggtgatggtcaagtgttggatgattgatgagaacattcgcccaacctttaaagaactagccaatgagttcaccaggatggcccgagacccaccacggtatctggtcataaagagagagagtgggcctggaatagcccctgggccagagccccatggtctgacaaacaagaagctagaggaagtagagctggagccagaactagacctagacctagacttggaagcagaggaggacaacctggcaaccaccacactgggctccgccctcagcctaccagttggaacacttaatcggccacgtgggagccagagccttttaagtccatcatctggatacatgcccatgaaccagggtaatcttggggagtcttgccaggagtctgcagtttctgggagcagtgaacggtgcccccgtccagtctctctacacccaatgccacggggatgcctggcatcagagtcatcagaggggcatgtaacaggctctgaggctgagctccaggagaaagtgtcaatgtgtaggagccggagcaggagccggagcccacggccacgcggagatagcgcctaccattcccagcgccacagtctgctgactcctgttaccccactctccccacccgggttagaggaagaggatgtcaacggttatgtcatgccagatacacacctcaaaggtactccctcctcccgggaaggcaccctttcttcagtgggtctcagttctgtcctgggtactgaagaagaagatgaagatgaggagtatgaatacatgaaccggaggagaaggcacagtccacctcatccccctaggccaagttcccttgaggagctgggttatgagtacatggatgtggggtcagacctcagtgcctctctgggcagcacacagagttgcccactccaccctgtacccatcatgcccactgcaggcacaactccagatgaagactatgaatatatgaatcggcaacgagatggaggtggtcctgggggtgattatgcagccatgggggcctgcccagcatctgagcaagggtatgaagagatgagagcttttcaggggcctggacatcaggccccccatgtccattatgcccgcctaaaaactctacgtagcttagaggctacagactctgcctttgataaccctgattactggcatagcaggcttttccccaaggctaatgcccagagaacgtaactcctgctccctgtggcactcagggagcatttaatggcagctagtgcctttagagggtaccgtcttctccctattccctctctctcccaggtcccagccccttttccccagtcccagacaattccattcaatctttggaggcttttaaacattttgacacaaaattcttatggtatgtagccagctgtgcactttcttctctttcccaaccccaggaaaggttttccttattttgtgtgctttcccagtcccattcctcagcttcttcacaggcactcctggagatatgaaggattactctccatatcccttcctctcaggctcttgactacttggaactaggctcttatgtgtgcctttgtttcccatcagactgtcaagaagaggaaagggaggaaacctagcagaggaaagtgtaattttggtttatgactcttaaccccctagaaagacagaagcttaaaatctgtgaagaaagaggttaggagtagatattgattactatcataattcagcacttaactatgagccaggcatcatactaaacttcacctacattatctcacttagtcctttatcatccttaaaacaattctgtgacatacatattatctcattttacacaaagggaagtcgggcatggtggctcatgcctgtaatctcagcactttgggaggctgaggcagaaggattacctgaggcaaggagtttgagaccagcttagccaacatagtaagacccccatctctttaaaaaaaaaaaaaaaaaaaaaaaaaaaactttagaactgggtgcagtggctcatgcctgtaatcccagccagcactttgggaggctgagatgggaagatcacttgagcccagaattagagataagcctatggaaacatagcaagacactgtctctacaggggaaaaaaaaaaaagaaactgagccttaaagagatgaaataaattaagcagtagatccaggatgcaaaatcctcccaattcctgtgcatgtgctcttattgtaaggtgccaagaaaaactgatttaagttacagcccttgtttaaggggcactgtttcttgtttttgcactgaatcaagtctaaccccaacagccacatcctcctatacctagacatctcatctcaggaagtggtggtgggggtagtcagaaggaaaaataactggacatctttgtgtaaaccataatccacatgtgccgtaaatgatcttcactccttatccgagggcaaattcacaaggatccccaagatccacttttagaagccattctcatcca

SEQ ID NO: 373 - DNA, 3343 bp, Homo Sapiens
  ref <308>: DATABASE ACCESSION NUMBER: GenBank No. M34641
  ref <309>: DATABASE ENTRY DATE: 2001-12-14
gaattcgggatgtggagctggaagtgcctcctcttctgggctgtgctggtcacagccacactctgcaccgctaggccgtccccgaccttgcctgaacaagcccagccctggggagcccctgtggaagtggagtccttcctggtccaccccggtgacctgctgcagcttcgctgtcggctgcgggacgatgtgcagagcatcaactggctgcgggacggggtgcagctggcggaaagcaaccgcacccgcatcacaggggaggaggtggaggtgcaggactccgtgcccgcagactccggcctctatgcttgcgtaaccagcagcccctcgggcagtgacaccacctacttctccgtcaatgtttcagatgctctcccctcctcggaggatgatgatgatgatgatgactcctcttcagaggagaaagaaacagataacaccaaaccaaaccccgtagctccatattggacatccccagaaaagatggaaaagaaattgcatgcagtgccggctgccaagacagtgaagttcaaatgcccttccagtgggaccccaaaccccacactgcgctggttgaaaaatagcaaagaattcaaacctgaccacagaattggaggctacaaggtccgttatgccacctggagcatcataatggactctgtggtgccctctgacaagggcaactacacctgcattgtggagaatgagtacggcagcatcaaccacacataccagctggatgtcgtggagcggtcccctcaccggcccatcctgcaagcagggttgcccgccaacaaaacagtggccctgggtagcaacgtggagttcatgtgtaaggtgtacagtgacccgcagccgcacatccagtggctaaagcacatcgaggtgaatgggagcaagattggcccagacaacctgccttatgtccagatcttgaagactgctggagttaataccaccgacaaagagatggaggtgcttcacttaagaaatgtctcctttgaggacgcaggggagtatacgtgcttggcgggtaactctatcggactctcccatcactctgcatggttgaccgttctggaagccctggaagagaggccggcagtgatgacctcgcccctgtacctggagatcatcatctattgcacaggggccttcctcatctcctgcatggtggggtcggtcatcgtctacaagatgaagagtggtaccaagaagagtgacttccacagccagatggctgtgcacaagctggccaagagcatccctctgcgcagacaggtaacagtgtctgctgactccagtgcatccatgaactctggggttcttctggttcggccatcacggctctcctccagtgggactcccatgctagcaggggtctctgagtatgagcttcccgaagaccctcgctgggagctgcctcgggacagactggtcttaggcaaacccctgggagagggctgctttgggcaggtggtgttggcagaggctatcgggctggacaaggacaaacccaaccgtgtgaccaaagtggctgtgaagatgttgaagtcggacgcaacagagaaagacttgtcagacctgatctcagaaatggagatgatgaagatgatcgggaagcataagaatatcatcaacctgctgggggcctgcacgcaggatggtcccttgtatgtcatcgtggagtatgcctccaagggcaacctgcgggagtacctgcaggcccggaggcccccagggctggaatactgctacaaccccagccacaacccagaggagcagctctcctccaaggacctggtgtcctgcgcctaccaggtggcccgaggcatggagtatctggcctccaagaagtgcatacaccgagacctggcagccaggaatgtcctggtgacagaggacaatgtgatgaagatagcagactttggcctcgcacgggacattcaccacatcgactactataaaaagacaaccaacggccgactgcctgtgaagtggatggcacccgaggcattatttgaccggatctacacccaccagagtgatgtgtggtctttcggggtgctcctgtgggagatcttcactctgggcggctccccataccccggtgtgcctgtggaggaacttttcaagctgctgaaggagggtcaccgcatggacaagcccagtaactgcaccaacgagctgtacatgatgatgcgggactgctggcatgcagtgccctcacagagacccaccttcaagcagctggtggaagacctggaccgcatcgtggccttgacctccaaccaggagtacctggacctgtccatgcccctggaccagtactcccccagctttcccgacacccggagctctacgtgctcctcaggggaggattccgtcttctctcatgagccgctgcccgaggagccctgcctgccccgacacccagcccagcttgccaatggcggactcaaacgccgctgactgccacccacacgccctccccagactccaccgtcagctgtaaccctcacccacagcccctgctgggcccaccacctgtccgtccctgtcccctttcctgctggcaggagccggctgcctaccaggggccttcctgtgtggcctgccttcaccccactcagctcacctctccctccacctcctctccacctgctggtgagaggtgcaaagaggcagatctttgctgccagccacttcatcccctcccagatgttggaccaacacccctccctgccacagcatcgcctggagggcagggagtgggagccaatgaacaggcatgcaagtgagagcttcctgagctttctctgtcggtttggtctgttttgccttcacccataagcccctcgcactctggtggcaggtgccttgtcctcagggctacagcagtagggaggtcagtgcttcgtgcctcgattgaaggtgacctctgccccagataggtggtgcagtggcttattaattccgatactagtttgctttgctgaccaaatgcctggtaccagaggatggtgaggcgaaggccaggttgggggcagtgttgtggccctggggccagccccaaactgggggctctgtatatagctatgaagaaaacacaaagtgtataaatctgagtatatatttacatgtctttttaaaagggtcgttaccagagatttacccatcgggtaagatgctcctggtggctgggaggcatcagttgctatatattaaaaacaaaaaagaaaaaaaaggaaaatgtttttaaaaaggtcatatattttttgctacttttgctgttttatttttttaaattatgttctaaactcgtgccgctcgtgccgaattc

SEQ ID NO: 374 - DNA, 4587 bp, Homo sapiens
  ref <308>: DATABASE ACCESSION NUMBER: GenBank No. NM000141
  ref <309>: DATABASE ENTRY DATE: 2004-12-20
gagcgggcgagggagcgcgcgcggccgccacaaagctcgggcgccgcggggctgcatgcggcgtacctggcccggcgcggcgactgctctccgggctggcgggggccggccgcgagccccgggggccccgaggccgcagcttgcctgcgcgctctgagccttcgcaactcgcgagcaaagtttggtggaggcaacgccaagcctgagtcctttcttcctctcgttccccaaatccgagggcagcccgcgggcgtcatgcccgcgctcctccgcagcctggggtacgcgtgaagcccgggaggcttggcgccggcgaagacccaaggaccactcttctgcgtttggagttgctccccacaaccccgggctcgtcgctttctccatcccgacccacgcggggcgcggggacaacacaggtcgcggaggagcgttgccattcaagtgactgcagcagcagcggcagcgcctcggttcctgagcccaccgcaggctgaaggcattgcgcgtagtccatgcccgtagaggaagtgtgcagatgggattaacgtccacatggagatatggaagaggaccggggattggtaccgtaaccatggtcagctggggtcgtttcatctgcctggtcgtggtcaccatggcaaccttgtccctggcccggccctccttcagtttagttgaggataccacattagagccagaagagccaccaaccaaataccaaatctctcaaccagaagtgtacgtggctgcgccaggggagtcgctagaggtgcgctgcctgttgaaagatgccgccgtgatcagttggactaaggatggggtgcacttggggcccaacaataggacagtgcttattggggagtacttgcagataaagggcgccacgcctagagactccggcctctatgcttgtactgccagtaggactgtagacagtgaaacttggtacttcatggtgaatgtcacagatgccatctcatccggagatgatgaggatgacaccgatggtgcggaagattttgtcagtgagaacagtaacaacaagagagcaccatactggaccaacacagaaaagatggaaaagcggctccatgctgtgcctgcggccaacactgtcaagtttcgctgcccagccggggggaacccaatgccaaccatgcggtggctgaaaaacgggaaggagtttaagcaggagcatcgcattggaggctacaaggtacgaaaccagcactggagcctcattatggaaagtgtggtcccatctgacaagggaaattatacctgtgtggtggagaatgaatacgggtccatcaatcacacgtaccacctggatgttgtggagcgatcgcctcaccggcccatcctccaagccggactgccggcaaatgcctccacagtggtcggaggagacgtagagtttgtctgcaaggtttacagtgatgcccagccccacatccagtggatcaagcacgtggaaaagaacggcagtaaatacgggcccgacgggctgccctacctcaaggttctcaaggccgccggtgttaacaccacggacaaagagattgaggttctctatattcggaatgtaacttttgaggacgctggggaatatacgtgcttggcgggtaattctattgggatatcctttcactctgcatggttgacagttctgccagcgcctggaagagaaaaggagattacagcttccccagactacctggagatagccatttactgcataggggtcttcttaatcgcctgtatggtggtaacagtcatcctgtgccgaatgaagaacacgaccaagaagccagacttcagcagccagccggctgtgcacaagctgaccaaacgtatccccctgcggagacaggtaacagtttcggctgagtccagctcctccatgaactccaacaccccgctggtgaggataacaacacgcctctcttcaacggcagacacccccatgctggcaggggtctccgagtatgaacttccagaggacccaaaatgggagtttccaagagataagctgacactgggcaagcccctgggagaaggttgctttgggcaagtggtcatggcggaagcagtgggaattgacaaagacaagcccaaggaggcggtcaccgtggccgtgaagatgttgaaagatgatgccacagagaaagacctttctgatctggtgtcagagatggagatgatgaagatgattgggaaacacaagaatatcataaatcttcttggagcctgcacacaggatgggcctctctatgtcatagttgagtatgcctctaaaggcaacctccgagaatacctccgagcccggaggccacccgggatggagtactcctatgacattaaccgtgttcctgaggagcagatgaccttcaaggacttggtgtcatgcacctaccagctggccagaggcatggagtacttggcttcccaaaaatgtattcatcgagatttagcagccagaaatgttttggtaacagaaaacaatgtgatgaaaatagcagactttggactcgccagagatatcaacaatatagactattacaaaaagaccaccaatgggcggcttccagtcaagtggatggctccagaagccctgtttgatagagtatacactcatcagagtgatgtctggtccttcggggtgttaatgtgggagatcttcactttagggggctcgccctacccagggattcccgtggaggaactttttaagctgctgaaggaaggacacagaatggataagccagccaactgcaccaacgaactgtacatgatgatgagggactgttggcatgcagtgccctcccagagaccaacgttcaagcagttggtagaagacttggatcgaattctcactctcacaaccaatgaggaatacttggacctcagccaacctctcgaacagtattcacctagttaccctgacacaagaagttcttgttcttcaggagatgattctgttttttctccagaccccatgccttacgaaccatgccttcctcagtatccacacataaacggcagtgttaaaacatgaatgactgtgtctgcctgtccccaaacaggacagcactgggaacctagctacactgagcagggagaccatgcctcccagagcttgttgtctccacttgtatatatggatcagaggagtaaataattggaaaagtaatcagcatatgtgtaaagatttatacagttgaaaacttgtaatcttccccaggaggagaagaaggtttctggagcagtggactgccacaagccaccatgtaacccctctcacctgccgtgcgtactggctgtggaccagtaggactcaaggtggacgtgcgttctgccttccttgttaattttgtaataattggagaagatttatgtcagcacacacttacagagcacaaatgcagtatataggtgctggatgtatgtaaatatattcaaattatgtataaatatatattatatatttacaaggagttattttttgtattgattttaaatggatgtcccaatgcacctagaaaattggtctctctttttttaatagctatttgctaaatgctgttcttacacataatttcttaattttcaccgagcagaggtggaaaaatacttttgctttcagggaaaatggtataacgttaatttattaataaattggtaatatacaaaacaattaatcatttatagttttttttgtaatttaagtggcatttctatgcaggcagcacagcagactagttaatctattgcttggacttaactagttatcagatcctttgaaaagagaatatttacaatatatgactaatttggggaaaatgaagttttgatttatttgtgtttaaatgctgctgtcagacgattgttcttagacctcctaaatgccccatattaaaagaactcattcataggaaggtgtttcattttggtgtgcaaccctgtcattacgtcaacgcaacgtctaactggacttcccaagataaatggtaccagcgtcctcttaaaagatgccttaatccattccttgaggacagaccttagttgaaatgatagcagaatgtgcttctctctggcagctggccttctgcttctgagttgcacattaatcagattagcctgattctcttcagtgaattttgataatggcttccagactctttgcgttggagacgcctgttaggatcttcaagtcccatcatagaaaattgaaacacagagttgttctgctgatagttttggggatacgtccatctttttaagggattgctttcatctaattctggcaggacctcaccaaaagatccagcctcatacctacatcagacaaaatatcgccgttgttccttctgtactaaagtattgtgttttgctttggaaacacccactcactttgcaatagccgtgcaagatgaatgcagattacactgatcttatgtgttacaaaattggagaaagtatttaataaaacctgttaatttttatactgacaataaaaatgtttctacagatattaatgttaacaagacaaaataaatgtcacgcaacttaaaaaaaaaaaaaaaa

SEQ ID NO: 375 - DNA, 4093 bp, Homo sapiens
  ref <308>: DATABASE ACCESSION NUMBER: GenBank No. NM000142
  ref <309>: DATABASE ENTRY DATE: 2004-12-20
cgcgcgctgcctgaggacgccgcggcccccgcccccgccatgggcgcccctgcctgcgccctcgcgctctgcgtggccgtggccatcgtggccggcgcctcctcggagtccttggggacggagcagcgcgtcgtggggcgagcggcagaagtcccgggcccagagcccggccagcaggagcagttggtcttcggcagcggggatgctgtggagctgagctgtcccccgcccgggggtggtcccatggggcccactgtctgggtcaaggatggcacagggctggtgccctcggagcgtgtcctggtggggccccagcggctgcaggtgctgaatgcctcccacgaggactccggggcctacagctgccggcagcggctcacgcagcgcgtactgtgccacttcagtgtgcgggtgacagacgctccatcctcgggagatgacgaagacggggaggacgaggctgaggacacaggtgtggacacaggggccccttactggacacggcccgagcggatggacaagaagctgctggccgtgccggccgccaacaccgtccgcttccgctgcccagccgctggcaaccccactccctccatctcctggctgaagaacggcagggagttccgcggcgagcaccgcattggaggcatcaagctgcggcatcagcagtggagcctggtcatggaaagcgtggtgccctcggaccgcggcaactacacctgcgtcgtggagaacaagtttggcagcatccggcagacgtacacgctggacgtgctggagcgctccccgcaccggcccatcctgcaggcggggctgccggccaaccagacggcggtgctgggcagcgacgtggagttccactgcaaggtgtacagtgacgcacagccccacatccagtggctcaagcacgtggaggtgaacggcagcaaggtgggcccggacggcacaccctacgttaccgtgctcaagacggcgggcgctaacaccaccgacaaggagctagaggttctctccttgcacaacgtcacctttgaggacgccggggagtacacctgcctggcgggcaattctattgggttttctcatcactctgcgtggctggtggtgctgccagccgaggaggagctggtggaggctgacgaggcgggcagtgtgtatgcaggcatcctcagctacggggtgggcttcttcctgttcatcctggtggtggcggctgtgacgctctgccgcctgcgcagcccccccaagaaaggcctgggctcccccaccgtgcacaagatctcccgcttcccgctcaagcgacaggtgtccctggagtccaacgcgtccatgagctccaacacaccactggtgcgcatcgcaaggctgtcctcaggggagggccccacgctggccaatgtctccgagctcgagctgcctgccgaccccaaatgggagctgtctcgggcccggctgaccctgggcaagccccttggggagggctgcttcggccaggtggtcatggcggaggccatcggcattgacaaggaccgggccgccaagcctgtcaccgtagccgtgaagatgctgaaagacgatgccactgacaaggacctgtcggacctggtgtctgagatggagatgatgaagatgatcgggaaacacaaaaacatcatcaacctgctgggcgcctgcacgcagggcgggcccctgtacgtgctggtggagtacgcggccaagggtaacctgcgggagtttctgcgggcgcggcggcccccgggcctggactactccttcgacacctgcaagccgcccgaggagcagctcaccttcaaggacctggtgtcctgtgcctaccaggtggcccggggcatggagtacttggcctcccagaagtgcatccacagggacctggctgcccgcaatgtgctggtgaccgaggacaacgtgatgaagatcgcagacttcgggctggcccgggacgtgcacaacctcgactactacaagaagacaaccaacggccggctgcccgtgaagtggatggcgcctgaggccttgtttgaccgagtctacactcaccagagtgacgtctggtcctttggggtcctgctctgggagatcttcacgctggggggctccccgtaccccggcatccctgtggaggagctcttcaagctgctgaaggagggccaccgcatggacaagcccgccaactgcacacacgacctgtacatgatcatgcgggagtgctggcatgccgcgccctcccagaggcccaccttcaagcagctggtggaggacctggaccgtgtccttaccgtgacgtccaccgacgagtacctggacctgtcggcgcctttcgagcagtactccccgggtggccaggacacccccagctccagctcctcaggggacgactccgtgtttgcccacgacctgctgcccccggccccacccagcagtgggggctcgcggacgtgaagggccactggtccccaacaatgtgaggggtccctagcagccctccctgctgctggtgcacagccactccccggcatgagactcagtgcagatggagagacagctacacagagctttggtctgtgtgtgtgtgtgtgcgtgtgtgtgtgtgtgtgcacatccgcgtgtgcctgtgtgcgtgcgcatcttgcctccaggtgcagaggtaccctgggtgtccccgctgctgtgcaacggtctcctgactggtgctgcagcaccgaggggcctttgttctggggggacccagtgcagaatgtaagtgggcccacccggtgggaccccgtggggcagggagctgggcccgacatggctcggcctctgcctttgcaccacgggacatcacagggtgcgctcggcccctcccacacccaaagctgagcctgcagggaagccccacatgtccagcaccttgtgcctggggtgttagtggcaccgcctccccacctccaggctttcccacttcccaccctgcccctcagagactgaaattacgggtacctgaagatgggagcctttaccttttatgcaaaaggtttattccggaaactagtgtacatttctataaatagatgctgtgtatatggtatatatacatatatatatataacatatatggaagaggaaaaggctggtacaacggaggcctgcgaccctgggggcacaggaggcaggcatggccctgggcggggcgtgggggggcgtggagggaggccccaggggtctcacccatgcaagcagaggaccagggctttttctggcaccgcagttttgttttaaaactggacctgtatatttgtaaagctatttatgggcccctggcactcttgttcccacaccccaacacttccagcatttagctggccacatggcggagagttttaatttttaacttattgacaaccgagaaggtttatcccgccgatagagggacggccaagaatgtacgtccagcctgccccggagctggaggatcccctccaagcctaaaaggttgttaatagttggaggtgattccagtgaagatattttatttgctttgtcctttttcaggagaattagatttctataggatttttctttaggagatttattttttggacttcaaagcaagctggtattttcatacaaattcttctaattgctgtgtgtcccaggcagggagacggtttccagggaggggccggccctgtgtgcaggttccgatgttattagatgttacaagtttatatatatctatatatataatttattgagtttttacaagatgtatttgttgtagacttaacacttcttacgcaatgcttctagagttttatagcctggactgctacctttcaaagcttggagggaagccgtgaattcagttggttcgttctgtactgttactgggccctgagtctgggcagctgtcccttgcttgcctgcagggccatggctcagggtggtctcttcttggggcccagtgcatggtggccagaggtgtcacccaaaccggcaggtgcgattttgttaacccagcgacgaactttccgaaaaataaagacacctggttgctaacctgaaaaaaaaaaaaaaaaaaaaaaaaaaaaaa

SEQ ID NO: 376 - DNA, 3015 bp, Homo Sapiens
  ref <308>: DATABASE ACCESSION NUMBER: GenBank NM_002011
  ref <309>: DATABASE ENTRY DATE: 2004-05-20
ccgaggagcgctcgggctgtctgcggaccctgccgcgtgcaggggtcgcggccggctggagctgggagtgaggcggcggaggagccaggtgaggaggagccaggaaggcagttggtgggaagtccagcttgggtccctgagagctgtgagaaggagatgcggctgctgctggccctgttgggggtcctgctgagtgtgcctgggcctccagtcttgtccctggaggcctctgaggaagtggagcttgagccctgcctggctcccagcctggagcagcaagagcaggagctgacagtagcccttgggcagcctgtgcggctgtgctgtgggcgggctgagcgtggtggccactggtacaaggagggcagtcgcctggcacctgctggccgtgtacggggctggaggggccgcctagagattgccagcttcctacctgaggatgctggccgctacctctgcctggcacgaggctccatgatcgtcctgcagaatctcaccttgattacaggtgactccttgacctccagcaacgatgatgaggaccccaagtcccatagggacctctcgaataggcacagttacccccagcaagcaccctactggacacacccccagcgcatggagaagaaactgcatgcagtacctgcggggaacaccgtcaagttccgctgtccagctgcaggcaaccccacgcccaccatccgctggcttaaggatggacaggcctttcatggggagaaccgcattggaggcattcggctgcgccatcagcactggagtctcgtgatggagagcgtggtgccctcggaccgcggcacatacacctgcctggtagagaacgctgtgggcagcatccgctataactacctgctagatgtgctggagcggtccccgcaccggcccatcctgcaggccgggctcccggccaacaccacagccgtggtgggcagcgacgtggagctgctgtgcaaggtgtacagcgatgcccagccccacatccagtggctgaagcacatcgtcatcaacggcagcagcttcggagccgacggtttcccctatgtgcaagtcctaaagactgcagacatcaatagctcagaggtggaggtcctgtacctgcggaacgtgtcagccgaggacgcaggcgagtacacctgcctcgcaggcaattccatcggcctctcctaccagtctgcctggctcacggtgctgccagaggaggaccccacatggaccgcagcagcgcccgaggccaggtatacggacatcatcctgtacgcgtcgggctccctggccttggctgtgctcctgctgctggccgggctgtatcgagggcaggcgctccacggccggcacccccgcccgcccgccactgtgcagaagctctcccgcttccctctggcccgacagttctccctggagtcaggctcttccggcaagtcaagctcatccctggtacgaggcgtgcgtctctcctccagcggccccgccttgctcgccggcctcgtgagtctagatctacctctcgacccactatgggagttcccccgggacaggctggtgcttgggaagcccctaggcgagggctgctttggccaggtagtacgtgcagaggcctttggcatggaccctgcccggcctgaccaagccagcactgtggccgtcaagatgctcaaagacaacgcctctgacaaggacctggccgacctggtctcggagatggaggtgatgaagctgatcggccgacacaagaacatcatcaacctgcttggtgtctgcacccaggaagggcccctgtacgtgatcgtggagtgcgccgccaagggaaacctgcgggagttcctgcgggcccggcgccccccaggccccgacctcagccccgacggtcctcggagcagtgaggggccgctctccttcccagtcctggtctcctgcgcctaccaggtggcccgaggcatgcagtatctggagtcccggaagtgtatccaccgggacctggctgcccgcaatgtgctggtgactgaggacaatgtgatgaagattgctgactttgggctggcccgcggcgtccaccacattgactactataagaaaaccagcaacggccgcctgcctgtgaagtggatggcgcccgaggccttgtttgaccgggtgtacacacaccagagtgacgtgtggtcttttgggatcctgctatgggagatcttcaccctcgggggctccccgtatcctggcatcccggtggaggagctgttctcgctgctgcgggagggacatcggatggaccgacccccacactgccccccagagctgtacgggctgatgcgtgagtgctggcacgcagcgccctcccagaggcctaccttcaagcagctggtggaggcgctggacaaggtcctgctggccgtctctgaggagtacctcgacctccgcctgaccttcggaccctattccccctctggtggggacgccagcagcacctgctcctccagcgattctgtcttcagccacgaccccctgccattgggatccagctccttccccttcgggtctggggtgcagacatgagcaaggctcaaggctgtgcaggcacataggctggtggccttgggccttggggctcagccacagcctgacacagtgctcgaccttgatagcatggggcccctggcccagagttgctgtgccgtgtccaagggccgtgcccttgcccttggagctgccgtgcctgtgtcctgatggcccaaatgtcagggttctgctcggcttcttggaccatggcgcttagtccccatcccgggtttggctgagcctggctggagagctgctatgctaaacctcctgcctcccaataccagcaggaggttctgggcctctgaaccccctttccccacacctccccctgctgctgctgccccagcgtcttgacgggagcattggcccctgagcccagagaagctggaagcctgccgaaaacaggagcaaatggcgttttataaattatttttttgaaataaa

SEQ ID NO: 377 - DNA, 6641 bp, Homo sapiens
  ref <308>: DATABASE ACCESSION NUMBER: GenBank No. NM000245
  ref <309>: DATABASE ENTRY DATE: 2004-10-28
gccctcgccgcccgcggcgccccgagcgctttgtgagcagatgcggagccgagtggagggcgcgagccagatgcggggcgacagctgacttgctgagaggaggcggggaggcgcggagcgcgcgtgtggtccttgcgccgctgacttctccactggttcctgggcaccgaaagataaacctctcataatgaaggcccccgctgtgcttgcacctggcatcctcgtgctcctgtttaccttggtgcagaggagcaatggggagtgtaaagaggcactagcaaagtccgagatgaatgtgaatatgaagtatcagcttcccaacttcaccgcggaaacacccatccagaatgtcattctacatgagcatcacattttccttggtgccactaactacatttatgttttaaatgaggaagaccttcagaaggttgctgagtacaagactgggcctgtgctggaacacccagattgtttcccatgtcaggactgcagcagcaaagccaatttatcaggaggtgtttggaaagataacatcaacatggctctagttgtcgacacctactatgatgatcaactcattagctgtggcagcgtcaacagagggacctgccagcgacatgtctttccccacaatcatactgctgacatacagtcggaggttcactgcatattctccccacagatagaagagcccagccagtgtcctgactgtgtggtgagcgccctgggagccaaagtcctttcatctgtaaaggaccggttcatcaacttctttgtaggcaataccataaattcttcttatttcccagatcatccattgcattcgatatcagtgagaaggctaaaggaaacgaaagatggttttatgtttttgacggaccagtcctacattgatgttttacctgagttcagagattcttaccccattaagtatgtccatgcctttgaaagcaacaattttatttacttcttgacggtccaaagggaaactctagatgctcagacttttcacacaagaataatcaggttctgttccataaactctggattgcattcctacatggaaatgcctctggagtgtattctcacagaaaagagaaaaaagagatccacaaagaaggaagtgtttaatatacttcaggctgcgtatgtcagcaagcctggggcccagcttgctagacaaataggagccagcctgaatgatgacattcttttcggggtgttcgcacaaagcaagccagattctgccgaaccaatggatcgatctgccatgtgtgcattccctatcaaatatgtcaacgacttcttcaacaagatcgtcaacaaaaacaatgtgagatgtctccagcatttttacggacccaatcatgagcactgctttaataggacacttctgagaaattcatcaggctgtgaagcgcgccgtgatgaatatcgaacagagtttaccacagctttgcagcgcgttgacttattcatgggtcaattcagcgaagtcctcttaacatctatatccaccttcattaaaggagacctcaccatagctaatcttgggacatcagagggtcgcttcatgcaggttgtggtttctcgatcaggaccatcaacccctcatgtgaattttctcctggactcccatccagtgtctccagaagtgattgtggagcatacattaaaccaaaatggctacacactggttatcactgggaagaagatcacgaagatcccattgaatggcttgggctgcagacatttccagtcctgcagtcaatgcctctctgccccaccctttgttcagtgtggctggtgccacgacaaatgtgtgcgatcggaggaatgcctgagcgggacatggactcaacagatctgtctgcctgcaatctacaaggttttcccaaatagtgcaccccttgaaggagggacaaggctgaccatatgtggctgggactttggatttcggaggaataataaatttgatttaaagaaaactagagttctccttggaaatgagagctgcaccttgactttaagtgagagcacgatgaatacattgaaatgcacagttggtcctgccatgaataagcatttcaatatgtccataattatttcaaatggccacgggacaacacaatacagtacattctcctatgtggatcctgtaataacaagtatttcgccgaaatacggtcctatggctggtggcactttacttactttaactggaaattacctaaacagtgggaattctagacacatttcaattggtggaaaaacatgtactttaaaaagtgtgtcaaacagtattcttgaatgttataccccagcccaaaccatttcaactgagtttgctgttaaattgaaaattgacttagccaaccgagagacaagcatcttcagttaccgtgaagatcccattgtctatgaaattcatccaaccaaatcttttattagtggtgggagcacaataacaggtgttgggaaaaacctgaattcagttagtgtcccgagaatggtcataaatgtgcatgaagcaggaaggaactttacagtggcatgtcaacatcgctctaattcagagataatctgttgtaccactccttccctgcaacagctgaatctgcaactccccctgaaaaccaaagcctttttcatgttagatgggatcctttccaaatactttgatctcatttatgtacataatcctgtgtttaagccttttgaaaagccagtgatgatctcaatgggcaatgaaaatgtactggaaattaagggaaatgatattgaccctgaagcagttaaaggtgaagtgttaaaagttggaaataagagctgtgagaatatacacttacattctgaagccgttttatgcacggtccccaatgacctgctgaaattgaacagcgagctaaatatagagtggaagcaagcaatttcttcaaccgtccttggaaaagtaatagttcaaccagatcagaatttcacaggattgattgctggtgttgtctcaatatcaacagcactgttattactacttgggtttttcctgtggctgaaaaagagaaagcaaattaaagatctgggcagtgaattagttcgctacgatgcaagagtacacactcctcatttggataggcttgtaagtgcccgaagtgtaagcccaactacagaaatggtttcaaatgaatctgtagactaccgagctacttttccagaagatcagtttcctaattcatctcagaacggttcatgccgacaagtgcagtatcctctgacagacatgtcccccatcctaactagtggggactctgatatatccagtccattactgcaaaatactgtccacattgacctcagtgctctaaatccagagctggtccaggcagtgcagcatgtagtgattgggcccagtagcctgattgtgcatttcaatgaagtcataggaagagggcattttggttgtgtatatcatgggactttgttggacaatgatggcaagaaaattcactgtgctgtgaaatccttgaacagaatcactgacataggagaagtttcccaatttctgaccgagggaatcatcatgaaagattttagtcatcccaatgtcctctcgctcctgggaatctgcctgcgaagtgaagggtctccgctggtggtcctaccatacatgaaacatggagatcttcgaaatttcattcgaaatgagactcataatccaactgtaaaagatcttattggctttggtcttcaagtagccaaaggcatgaaatatcttgcaagcaaaaagtttgtccacagagacttggctgcaagaaactgtatgctggatgaaaaattcacagtcaaggttgctgattttggtcttgccagagacatgtatgataaagaatactatagtgtacacaacaaaacaggtgcaaagctgccagtgaagtggatggctttggaaagtctgcaaactcaaaagtttaccaccaagtcagatgtgtggtcctttggcgtgctcctctgggagctgatgacaagaggagccccaccttatcctgacgtaaacacctttgatataactgtttacttgttgcaagggagaagactcctacaacccgaatactgcccagaccccttatatgaagtaatgctaaaatgctggcaccctaaagccgaaatgcgcccatccttttctgaactggtgtcccggatatcagcgatcttctctactttcattggggagcactatgtccatgtgaacgctacttatgtgaacgtaaaatgtgtcgctccgtatccttctctgttgtcatcagaagataacgctgatgatgaggtggacacacgaccagcctccttctgggagacatcatagtgctagtactatgtcaaagcaacagtccacactttgtccaatggttttttcactgcctgacctttaaaaggccatcgatattctttgctcttgccaaaattgcactattataggacttgtattgttatttaaattactggattctaaggaatttcttatctgacagagcatcagaaccagaggcttggtcccacaggccacggaccaatggcctgcagccgtgacaacactcctgtcatattggagtccaaaacttgaattctgggttgaattttttaaaaatcaggtaccacttgatttcatatgggaaattgaagcaggaaatattgagggcttcttgatcacagaaaactcagaagagatagtaatgctcaggacaggagcggcagccccagaacaggccactcatttagaattctagtgtttcaaaacacttttgtgtgttgtatggtcaataacatttttcattactgatggtgtcattcacccattaggtaaacattcccttttaaatgtttgtttgttttttgagacaggatctcactctgttgccagggctgtagtgcagtggtgtgatcatagctcactgcaacctccacctcccaggctcaagcctcccgaatagctgggactacaggcgcacaccaccatccccggctaatttttgtattttttgtagagacggggttttgccatgttgccaaggctggtttcaaactcctggactcaagaaatccacccacctcagcctcccaaagtgctaggattacaggcatgagccactgcgcccagcccttataaatttttgtatagacattcctttggttggaagaatatttataggcaatacagtcaaagtttcaaaatagcatcacacaaaacatgtttataaatgaacaggatgtaatgtacatagatgacattaagaaaatttgtatgaaataatttagtcatcatgaaatatttagttgtcatataaaaacccactgtttgagaatgatgctactctgatctaatgaatgtgaacatgtagatgttttgtgtgtatttttttaaatgaaaactcaaaataagacaagtaatttgttgataaatatttttaaagataactcagcatgtttgtaaagcaggatacattttactaaaaggttcattggttccaatcacagctcataggtagagcaaagaaagggtggatggattgaaaagattagcctctgtctcggtggcaggttcccacctcgcaagcaattggaaacaaaacttttggggagttttattttgcattagggtgtgttttatgttaagcaaaacatactttagaaacaaatgaaaaaggcaattgaaaatcccagctatttcacctagatggaatagccaccctgagcagaactttgtgatgcttcattctgtggaattttgtgcttgctactgtatagtgcatgtggtgtaggttactctaactggttttgtcgacgtaaacatttaaagtgttatattttttataaaaatgtttatttttaatgatatgagaaaaattttgttaggccacaaaaacactgcactgtgaacattttagaaaaggtatgtcagactgggattaatgacagcatgattttcaatgactgtaaattgcgataaggaaatgtactgattgccaatacaccccaccctcattacatcatcaggacttgaagccaagggttaacccagcaagctacaaagagggtgtgtcacactgaaactcaatagttgagtttggctgttgttgcaggaaaatgattataactaaaagctctctgatagtgcagagacttaccagaagacacaaggaattgtactgaagagctattacaatccaaatattgccgtttcataaatgtaataagtaatactaattcacagagtattgtaaatggtggatgacaaaagaaaatctgctctgtggaaagaaagaactgtctctaccagggtcaagagcatgaacgcatcaatagaaagaactcggggaaacatcccatcaacaggactacacacttgtatatacattcttgagaacactgcaatgtgaaaatcacgtttgctatttataaacttgtccttagattaatgtgtctggacagattgtgggagtaagtgattcttctaagaattagatacttgtcactgcctatacctgcagctgaactgaatggtacttcgtatgttaatagttgttctgataaatcatgcaattaaagtaaagtgatgcaacatcttgtaaaaaaaaaaaaaaaaaaaa

SEQ ID NO: 378 - DNA, 4541 bp, Homo Sapiens
  ref <308>: DATABASE ACCESSION NUMBER: GenBank No. NM002447
  ref <309>: DATABASE ENTRY DATE: 2004-10-28
ggatcctctagggtcccagctcgcctcgatggagctcctcccgccgctgcctcagtccttcctgttgctgctgctgttgcctgccaagcccgcggcgggcgaggactggcagtgcccgcgcaccccctacgcggcctctcgcgactttgacgtgaagtacgtggtgcccagcttctccgccggaggcctggtacaggccatggtgacctacgagggcgacagaaatgagagtgctgtgtttgtagccatacgcaatcgcctgcatgtgcttgggcctgacctgaagtctgtccagagcctggccacgggccctgctggagaccctggctgccagacgtgtgcagcctgtggcccaggaccccacggccctcccggtgacacagacacaaaggtgctggtgctggatcccgcgctgcctgcgctggtcagttgtggctccagcctgcagggccgctgcttcctgcatgacctagagccccaagggacagccgtgcatctggcagcgccagcctgcctcttctcagcccaccataaccggcccgatgactgccccgactgtgtggccagcccattgggcacccgtgtaactgtggttgagcaaggccaggcctcctatttctacgtggcatcctcactggacgcagccgtggctggcagcttcagcccacgctcagtgtctatcaggcgtctcaaggctgacgcctcgggattcgcaccgggctttgtggcgttgtcagtgctgcccaagcatcttgtctcctacagtattgaatacgtgcacagcttccacacgggagccttcgtatacttcctgactgtacagccggccagcgtgacagatgatcctagtgccctgcacacacgcctggcacggcttagcgccactgagccagagttgggtgactatcgggagctggtcctcgactgcagatttgctccaaaacgcaggcgccggggggccccagaaggcggacagccctaccctgtgctgcaggtggcccactccgctccagtgggtgcccaacttgccactgagctgagcatcgccgagggccaggaagtactatttggggtctttgtgactggcaaggatggtggtcctggcgtgggccccaactctgtcgtctgtgccttccccattgacctgctggacacactaattgatgagggtgtggagcgctgttgtgaatccccagtccatccaggcctccggcgaggcctcgacttcttccagtcgcccagtttttgccccaacccgcctggcctggaagccctcagccccaacaccagctgccgccacttccctctgctggtcagtagcagcttctcacgtgtggacctattcaatgggctgttgggaccagtacaggtcactgcattgtatgtgacacgccttgacaacgtcacagtggcacacatgggcacaatggatgggcgtatcctgcaggtggagctggtcaggtcactaaactacttgctgtatgtgtccaacttctcactgggtgacagtgggcagcccgtgcagcgggatgtcagtcgtcttggggaccacctactctttgcctctggggaccaggttttccaggtacctatccgaggccctggctgccgccacttcctgacctgtgggcgttgcctaagggcatggcatttcatgggctgtggctggtgtgggaacatgtgcggccagcagaaggagtgtcctggctcctggcaacaggaccactgcccacctaagcttactgagttccacccccacagtggacctctaaggggcagtacaaggctgaccctgtgtggctccaacttctaccttcacccttctggtctggtgcctgagggaacccatcaggtcactgtgggccaaagtccctgccggccactgcccaaggacagctcaaaactcagaccagtgccccggaaagactttgtagaggagtttgagtgtgaactggagcccttgggcacccaggcagtggggcctaccaacgtcagcctcaccgtgactaacatgccaccgggcaagcacttccgggtagacggcacctccgtgctgagaggcttctctttcatggagccagtgctgatagcagtgcaacccctctttggcccacgggcaggaggcacctgtctcactcttgaaggccagagtctgtctgtaggcaccagccgggctgtgctggtcaatgggactgagtgtctgctagcacgggtcagtgaggggcagcttttatgtgccacaccccctggggccacggtggccagtgtcccccttagcctgcaggtggggggtgcccaggtacctggttcctggaccttccagtacagagaagaccctgtcgtgctaagcatcagccccaactgtggctacatcaactcccacatcaccatctgtggccagcatctaacttcagcatggcacttagtgctgtcattccatgacgggcttagggcagtggaaagcaggtgtgagaggcagcttccagagcagcagctgtgccgccttcctgaatatgtggtccgagacccccagggatgggtggcagggaatctgagtgcccgaggggatggagctgctggctttacactgcctggctttcgcttcctacccccaccccatccacccagtgccaacctagttccactgaagcctgaggagcatgccattaagtttgagtatattgggctgggcgctgtggctgactgtgtgggtatcaacgtgaccgtgggtggtgagagctgccagcacgagttccggggggacatggttgtctgccccctgcccccatccctgcagcttggccaggatggtgccccattgcaggtctgcgtagatggtgaatgtcatatcctgggtagagtggtgcggccagggccagatggggtcccacagagcacgctccttggtatcctgctgcctttgctgctgcttgtggctgcactggcgactgcactggtcttcagctactggtggcggaggaagcagctagttcttcctcccaacctgaatgacctggcatccctggaccagactgctggagccacacccctgcctattctgtactcgggctctgactacagaagtggccttgcactccctgccattgatggtctggattccaccacttgtgtccatggagcatccttctccgatagtgaagatgaatcctgtgtgccactgctgcggaaagagtccatccagctaagggacctggactctgcgctcttggctgaggtcaaggatgtgctgattccccatgagcgggtggtcacccacagtgaccgagtcattggcaaaggccactttggagttgtctaccacggagaatacatagaccaggcccagaatcgaatccaatgtgccatcaagtcactaagtcgcatcacagagatgcagcaggtggaggccttcctgcgagaggggctgctcatgcgtggcctgaaccacccgaatgtgctggctctcattggtatcatgttgccacctgagggcctgccccatgtgctgctgccctatatgtgccacggtgacctgctccagttcatccgctcacctcagcggaaccccaccgtgaaggacctcatcagctttggcctgcaggtagcccgcggcatggagtacctggcagagcagaagtttgtgcacagggacctggctgcgcggaactgcatgctggacgagtcattcacagtcaaggtggctgactttggtttggcccgcgacatcctggacagggagtactatagtgttcaacagcatcgccacgctcgcctacctgtgaagtggatggcgctggagagcctgcagacctatagatttaccaccaagtctgatgtgtggtcatttggtgtgctgctgtgggaactgctgacacggggtgccccaccataccgccacattgacccttttgaccttacccacttcctggcccagggtcggcgcctgccccagcctgagtattgccctgattctctgtaccaagtgatgcagcaatgctgggaggcagacccagcagtgcgacccaccttcagagtactagtgggggaggtggagcagatagtgtctgcactgcttggggaccattatgtgcagctgccagcaacctacatgaacttgggccccagcacctcgcatgagatgaatgtgcgtccagaacagccgcagttctcacccatgccagggaatgtacgccggccccggccactctcagagcctcctcggcccacttgacttagttcttgggctggacctgcttagctgccttgagctaaccccaaggctgcctctgggccatgccaggccagagcagtggccctccaccttgttcctgccctttaactttcagaggcaataggtaaatgggcccattaggtccctcactccacagagtgagccagtgagggcagtcctgcaacatgtatttatggagtgcctgctgtggaccctgtcttctgggcacagtggactcagcagtgaccacaccaacactgacccttgaaccaataaaggaacaaatgactattaaagcacaaaaaaaaaa

SEQ ID NO: 379 - DNA, 3985 bp, Homo Sapiens
  ref <308>: DATABASE ACCESSION NUMBER: GenBank No. NM005211
  ref <309>: DATABASE ENTRY DATE: 2004-10-26
gaagggcagacagagtgtccaaaagcgtgagagcacgaagtgaggagaaggtggagaagagagaagaggaagaggaagaggaagagaggaagcggagggaactgcggccaggctaaaaggggaagaagaggatcagcccaaggaggaggaagaggaaaacaagacaaacagccagtgcagaggagaggaacgtgtgtccagtgtcccgatccctgcggagctagtagctgagagctctgtgccctgggcaccttgcagccctgcacctgcctgccacttccccaccgaggccatgggcccaggagttctgctgctcctgctggtggccacagcttggcatggtcagggaatcccagtgatagagcccagtgtccctgagctggtcgtgaagccaggagcaacggtgaccttgcgatgtgtgggcaatggcagcgtggaatgggatggccccccatcacctcactggaccctgtactctgatggctccagcagcatcctcagcaccaacaacgctaccttccaaaacacggggacctatcgctgcactgagcctggagaccccctgggaggcagcgccgccatccacctctatgtcaaagaccctgcccggccctggaacgtgctagcacaggaggtggtcgtgttcgaggaccaggacgcactactgccctgtctgctcacagacccggtgctggaagcaggcgtctcgctggtgcgtgtgcgtggccggcccctcatgcgccacaccaactactccttctcgccctggcatggcttcaccatccacagggccaagttcattcagagccaggactatcaatgcagtgccctgatgggtggcaggaaggtgatgtccatcagcatccggctgaaagtgcagaaagtcatcccagggcccccagccttgacactggtgcctgcagagctggtgcggattcgaggggaggctgcccagatcgtgtgctcagccagcagcgttgatgttaactttgatgtcttcctccaacacaacaacaccaagctcgcaatccctcaacaatctgactttcataataaccgttaccaaaaagtcctgaccctcaacctcgatcaagtagatttccaacatgccggcaactactcctgcgtggccagcaacgtgcagggcaagcactccacctccatgttcttccgggtggtagagagtgcctacttgaacttgagctctgagcagaacctcatccaggaggtgaccgtgggggaggggctcaacctcaaagtcatggtggaggcctacccaggcctgcaaggttttaactggacctacctgggacccttttctgaccaccagcctgagcccaagcttgctaatgctaccaccaaggacacatacaggcacaccttcaccctctctctgccccgcctgaagccctctgaggctggccgctactccttcctggccagaaacccaggaggctggagagctctgacgtttgagctcacccttcgataccccccagaggtaagcgtcatatggacattcatcaacggctctggcacccttttgtgtgctgcctctgggtacccccagcccaacgtgacatggctgcagtgcagtggccacactgataggtgtgatgaggcccaagtgctgcaggtctgggatgacccataccctgaggtcctgagccaggagcccttccacaaggtgacggtgcagagcctgctgactgttgagaccttagagcacaaccaaacctacgagtgcagggcccacaacagcgtggggagtggctcctgggccttcatacccatctctgcaggagcccacacgcatcccccggatgagttcctcttcacaccagtggtggtcgcctgcatgtccatcatggccttgctgctgctgctgctcctgctgctattgtacaagtataagcagaagcccaagtaccaggtccgctggaagatcatcgagagctatgagggcaacagttatactttcatcgaccccacgcagctgccttacaacgagaagtgggagttcccccggaacaacctgcagtttggtaagaccctcggagctggagcctttgggaaggtggtggaggccacggcctttggtctgggcaaggaggatgctgtcctgaaggtggctgtgaagatgctgaagtccacggcccatgctgatgagaaggaggccctcatgtccgagctgaagatcatgagccacctgggccagcacgagaacatcgtcaaccttctgggagcctgtacccatggaggccctgtactggtcatcacggagtactgttgctatggcgacctgctcaactttctgcgaaggaaggctgaggccatgctgggacccagcctgagccccggccaggaccccgagggaggcgtcgactataagaacatccacctcgagaagaaatatgtccgcagggacagtggcttctccagccagggtgtggacacctatgtggagatgaggcctgtctccacttcttcaaatgactccttctctgagcaagacctggacaaggaggatggacggcccctggagctccgggacctgcttcacttctccagccaagtagcccagggcatggccttcctcgcttccaagaattgcatccaccgggacgtggcagcgcgtaacgtgctgttgaccaatggtcatgtggccaagattggggacttcgggctggctagggacatcatgaatgactccaactacattgtcaagggcaatgcccgcctgcctgtgaagtggatggccccagagagcatctttgactgtgtctacacggttcagagcgacgtctggtcctatggcatcctcctctgggagatcttctcacttgggctgaatccctaccctggcatcctggtgaacagcaagttctataaactggtgaaggatggataccaaatggcccagcctgcatttgccccaaagaatatatacagcatcatgcaggcctgctgggccttggagcccacccacagacccaccttccagcagatctgctccttccttcaggagcaggcccaagaggacaggagagagcgggactataccaatctgccgagcagcagcagaagcggtggcagcggcagcagcagcagtgagctggaggaggagagctctagtgagcacctgacctgctgcgagcaaggggatatcgcccagcccttgctgcagcccaacaactatcagttctgctgaggagttgacgacagggagtaccactctcccctcctccaaacttcaactcctccatggatggggcgacacggggagaacatacaaactctgccttcggtcatttcactcaacagctcggcccagctctgaaacttgggaaggtgagggattcaggggaggtcagaggatcccacttcctgagcatgggccatcactgccagtcaggggctgggggctgagccctcacccccccctcccctactgttctcatggtgttggcctcgtgtttgctatgccaactagtagaaccttctttcctaatccccttatcttcatggaaatggactgactttatgcctatgaagtccccaggagctacactgatactgagaaaaccaggctctttggggctagacagactggcagagagtgagatctccctctctgagaggagcagcagatgctcacagaccacactcagctcaggccccttggagcaggatggctcctctaagaatctcacaggacctcttagtctctgccctatacgccgccttcactccacagcctcacccctcccacccccatactggtactgctgtaatgagccaagtggcagctaaaagttgggggtgttctgcccagtcccgtcattctgggctagaaggcaggggaccttggcatgtggctggccacaccaagcaggaagcacaaactcccccaagctgactcatcctaactaacagtcacgccgtgggatgtctctgtccacattaaactaacagcattaatgca

SEQ ID NO: 380 - DNA, 5084 bp, Homo Sapiens
  ref <308>: DATABASE ACCESSION NUMBER: GenBank No. NM_00022
  ref <309>: DATABASE ENTRY DATE: 2003-12-20
gatcccatcgcagctaccgcgatgagaggcgctcgcggcgcctgggattttctctgcgttctgctcctactgcttcgcgtccagacaggctcttctcaaccatctgtgagtccaggggaaccgtctccaccatccatccatccaggaaaatcagacttaatagtccgcgtgggcgacgagattaggctgttatgcactgatccgggctttgtcaaatggacttttgagatcctggatgaaacgaatgagaataagcagaatgaatggatcacggaaaaggcagaagccaccaacaccggcaaatacacgtgcaccaacaaacacggcttaagcaattccatttatgtgtttgttagagatcctgccaagcttttccttgttgaccgctccttgtatgggaaagaagacaacgacacgctggtccgctgtcctctcacagacccagaagtgaccaattattccctcaaggggtgccaggggaagcctcttcccaaggacttgaggtttattcctgaccccaaggcgggcatcatgatcaaaagtgtgaaacgcgcctaccatcggctctgtctgcattgttctgtggaccaggagggcaagtcagtgctgtcggaaaaattcatcctgaaagtgaggccagccttcaaagctgtgcctgttgtgtctgtgtccaaagcaagctatcttcttagggaaggggaagaattcacagtgacgtgcacaataaaagatgtgtctagttctgtgtactcaacgtggaaaagagaaaacagtcagactaaactacaggagaaatataatagctggcatcacggtgacttcaattatgaacgtcaggcaacgttgactatcagttcagcgagagttaatgattctggagtgttcatgtgttatgccaataatacttttggatcagcaaatgtcacaacaaccttggaagtagtagataaaggattcattaatatcttccccatgataaacactacagtatttgtaaacgatggagaaaatgtagatttgattgttgaatatgaagcattccccaaacctgaacaccagcagtggatctatatgaacagaaccttcactgataaatgggaagattatcccaagtctgagaatgaaagtaatatcagatacgtaagtgaacttcatctaacgagattaaaaggcaccgaaggaggcacttacacattcctagtgtccaattctgacgtcaatgctgccatagcatttaatgtttatgtgaatacaaaaccagaaatcctgacttacgacaggctcgtgaatggcatgctccaatgtgtggcagcaggattcccagagcccacaatagattggtatttttgtccaggaactgagcagagatgctctgcttctgtactgccagtggatgtgcagacactaaactcatctgggccaccgtttggaaagctagtggttcagagttctatagattctagtgcattcaagcacaatggcacggttgaatgtaaggcttacaacgatgtgggcaagacttctgcctattttaactttgcatttaaaggtaacaacaaagagcaaatccatccccacaccctgttcactcctttgctgattggtttcgtaatcgtagctggcatgatgtgcattattgtgatgattctgacctacaaatatttacagaaacccatgtatgaagtacagtggaaggttgttgaggagataaatggaaacaattatgtttacatagacccaacacaacttccttatgatcacaaatgggagtttcccagaaacaggctgagttttgggaaaaccctgggtgctggagctttcgggaaggttgttgaggcaactgcttatggcttaattaagtcagatgcggccatgactgtcgctgtaaagatgctcaagccgagtgcccatttgacagaacgggaagccctcatgtctgaactcaaagtcctgagttaccttggtaatcacatgaatattgtgaatctacttggagcctgcaccattggagggcccaccctggtcattacagaatattgttgctatggtgatcttttgaattttttgagaagaaaacgtgattcatttatttgttcaaagcaggaagatcatgcagaagctgcactttataagaatcttctgcattcaaaggagtcttcctgcagcgatagtactaatgagtacatggacatgaaacctggagtttcttatgttgtcccaaccaaggccgacaaaaggagatctgtgagaataggctcatacatagaaagagatgtgactcccgccatcatggaggatgacgagttggccctagacttagaagacttgctgagcttttcttaccaggtggcaaagggcatggctttcctcgcctccaagaattgtattcacagagacttggcagccagaaatatcctccttactcatggtcggatcacaaagatttgtgattttggtctagccagagacatcaagaatgattctaattatgtggttaaaggaaacgctcgactacctgtgaagtggatggcacctgaaagcattttcaactgtgtatacacgtttgaaagtgacgtctggtcctatgggatttttctttgggagctgttctctttaggaagcagcccctatcctggaatgccggtcgattctaagttctacaagatgatcaaggaaggcttccggatgctcagccctgaacacgcacctgctgaaatgtatgacataatgaagacttgctgggatgcagatcccctaaaaagaccaacattcaagcaaattgttcagctaattgagaagcagatttcagagagcaccaatcatatttactccaacttagcaaactgcagccccaaccgacagaagcccgtggtagaccattctgtgcggatcaattctgtcggcagcaccgcttcctcctcccagcctctgcttgtgcacgacgatgtctgagcagaatcagtgtttgggtcacccctccaggaatgatctcttcttttggcttccatgatggttattttcttttctttcaacttgcatccaactccaggatagtgggcaccccactgcaatcctgtctttctgagcacactttagtggccgatgatttttgtcatcagccaccatcctattgcaaaggttccaactgtatatattcccaatagcaacgtagcttctaccatgaacagaaaacattctgatttggaaaaagagagggaggtatggactgggggccagagtcctttccaaggcttctccaattctgcccaaaaatatggttgatagtttacctgaataaatggtagtaatcacagttggccttcagaaccatccatagtagtatgatgatacaagattagaagctgaaaacctaagtcctttatgtggaaaacagaacatcattagaacaaaggacagagtatgaacacctgggcttaagaaatctagtatttcatgctgggaatgagacataggccatgaaaaaaatgatccccaagtgtgaacaaaagatgctcttctgtggaccactgcatgagcttttatactaccgacctggtttttaaatagagtttgctattagagcattgaattggagagaaggcctccctagccagcacttgtatatacgcatctataaattgtccgtgttcatacatttgaggggaaaacaccataaggtttcgtttctgtatacaaccctggcattatgtccactgtgtatagaagtagattaagagccatataagtttgaaggaaacagttaataccattttttaaggaaacaatataaccacaaagcacagtttgaacaaaatctcctcttttagctgatgaacttattctgtagattctgtggaacaagcctatcagcttcagaatggcattgtactcaatggatttgatgctgtttgacaaagttactgattcactgcatggctcccacaggagtgggaaaacactgccatcttagtttggattcttatgtagcaggaaataaagtataggtttagcctccttcgcaggcatgtcctggacaccgggccagtatctatatatgtgtatgtacgtttgtatgtgtgtagacaaatatttggaggggtatttttgccctgagtccaagagggtcctttagtacctgaaaagtaacttggctttcattattagtactgctcttgtttcttttcacatagctgtctagagtagcttaccagaagcttccatagtggtgcagaggaagtggaaggcatcagtccctatgtatttgcagttcacctgcacttaaggcactctgttatttagactcatcttactgtacctgttccttagaccttccataatgctactgtctcactgaaacatttaaattttaccctttagactgtagcctggatattattcttgtagtttacctctttaaaaacaaaacaaaacaaaacaaaaaactccccttcctcactgcccaatataaaaggcaaatgtgtacatggcagagtttgtgtgttgtcttgaaagattcaggtatgttgcctttatggtttcccccttctacatttcttagactacatttagagaactgtggccgttatctggaagtaaccatttgcactggagttctatgctctcgcacctttccaaagttaacagattttggggttgtgttgtcacccaagagattgttgtttgccatactttgtctgaaaaattcctttgtgtttctattgacttcaatgatagtaagaaaagtggttgttagttatagatgtctaggtacttcaggggcacttcattgagagttttgtcttgccatactttgtctgaaaaattcctttgtgtttctattgacttcaatgatagtaagaaaagtggttgttagttatagatgtctaggtacttcaggggcacttcattgagagttttgtcaatgtcttttgaatattcccaagcccatgagtccttgaaaatattttttatatatacagtaactttatgtgtaaatacataagcggcgtaagtttaaaggatgttggtgttccacgtgttttattcctgtatgttgtccaattgttgacagttctgaagaattc

SEQ ID NO: 381 - DNA, 3475 bp, Homo sapiens
  ref <308>: DATABASE ACCESSION NUMBER: GenBank No. NM004119
  ref <309>: DATABASE ENTRY DATE: 2005-01-22
cgaggcggcatccgagggctgggccggcgccctgggggaccccgggctccggaggccatgccggcgttggcgcgcgacgcgggcaccgtgccgctgctcgttgttttttctgcaatgatatttgggactattacaaatcaagatctgcctgtgatcaagtgtgttttaatcaatcataagaacaatgattcatcagtggggaagtcatcatcatatcccatggtatcagaatccccggaagacctcgggtgtgcgttgagaccccagagctcagggacagtgtacgaagctgccgctgtggaagtggatgtatctgcttccatcacactgcaagtgctggtcgatgccccagggaacatttcctgtctctgggtctttaagcacagctccctgaattgccagccacattttgatttacaaaacagaggagttgtttccatggtcattttgaaaatgacagaaacccaagctggagaatacctactttttattcagagtgaagctaccaattacacaatattgtttacagtgagtataagaaataccctgctttacacattaagaagaccttactttagaaaaatggaaaaccaggacgccctggtctgcatatctgagagcgttccagagccgatcgtggaatgggtgctttgcgattcacagggggaaagctgtaaagaagaaagtccagctgttgttaaaaaggaggaaaaagtgcttcatgaattatttgggacggacataaggtgctgtgccagaaatgaactgggcagggaatgcaccaggctgttcacaatagatctaaatcaaactcctcagaccacattgccacaattatttcttaaagtaggggaacccttatggataaggtgcaaagctgttcatgtgaaccatggattcgggctcacctgggaattagaaaacaaagcactcgaggagggcaactactttgagatgagtacctattcaacaaacagaactatgatacggattctgtttgcttttgtatcatcagtggcaagaaacgacaccggatactacacttgttcctcttcaaagcatcccagtcaatcagctttggttaccatcgtaggaaagggatttataaatgctaccaattcaagtgaagattatgaaattgaccaatatgaagagttttgtttttctgtcaggtttaaagcctacccacaaatcagatgtacgtggaccttctctcgaaaatcatttccttgtgagcaaaagggtcttgataacggatacagcatatccaagttttgcaatcataagcaccagccaggagaatatatattccatgcagaaaatgatgatgcccaatttaccaaaatgttcacgctgaatataagaaggaaacctcaagtgctcgcagaagcatcggcaagtcaggcgtcctgtttctcggatggatacccattaccatcttggacctggaagaagtgttcagacaagtctcccaactgcacagaagagatcacagaaggagtctggaatagaaaggctaacagaaaagtgtttggacagtgggtgtcgagcagtactctaaacatgagtgaagccataaaagggttcctggtcaagtgctgtgcatacaattcccttggcacatcttgtgagacgatccttttaaactctccaggccccttccctttcatccaagacaacatctcattctatgcaacaattggtgtttgtctcctcttcattgtcgttttaaccctgctaatttgtcacaagtacaaaaagcaatttaggtatgaaagccagctacagatggtacaggtgaccggctcctcagataatgagtacttctacgttgatttcagagaatatgaatatgatctcaaatgggagtttccaagagaaaatttagagtttgggaaggtactaggatcaggtgcttttggaaaagtgatgaacgcaacagcttatggaattagcaaaacaggagtctcaatccaggttgccgtcaaaatgctgaaagaaaaagcagacagctctgaaagagaggcactcatgtcagaactcaagatgatgacccagctgggaagccacgagaatattgtgaacctgctgggggcgtgcacactgtcaggaccaatttacttgatttttgaatactgttgctatggtgatcttctcaactatctaagaagtaaaagagaaaaatttcacaggacttggacagagattttcaaggaacacaatttcagtttttaccccactttccaatcacatccaaattccagcatgcctggttcaagagaagttcagatacacccggactcggatcaaatctcagggcttcatgggaattcatttcactctgaagatgaaattgaatatgaaaaccaaaaaaggctggaagaagaggaggacttgaatgtgcttacatttgaagatcttctttgctttgcatatcaagttgccaaaggaatggaatttctggaatttaagtcgtgtgttcacagagacctggccgccaggaacgtgcttgtcacccacgggaaagtggtgaagatatgtgactttggattggctcgagatatcatgagtgattccaactatgttgtcaggggcaatgcccgtctgcctgtaaaatggatggcccccgaaagcctgtttgaaggcatctacaccattaagagtgatgtctggtcatatggaatattactgtgggaaatcttctcacttggtgtgaatccttaccctggcattccggttgatgctaacttctacaaactgattcaaaatggatttaaaatggatcagccattttatgctacagaagaaatatacattataatgcaatcctgctgggcttttgactcaaggaaacggccatccttccctaatttgacttcgtttttaggatgtcagctggcagatgcagaagaagcgatgtatcagaatgtggatggccgtgtttcggaatgtcctcacacctaccaaaacaggcgacctttcagcagagagatggatttggggctactctctccgcaggctcaggtcgaagattcgtagaggaacaatttagttttaaggacttcatccctccacctatccctaacaggctgtagattaccaaaacaagattaatttcatcactaaaagaaaatctattatcaactgctgcttcaccagacttttctctagaagccgtctgcgtttactcttgttttcaaagggacttttgtaaaatcaaatcatcctgtcacaaggcaggaggagctgataatgaactttattggagcattgatctgcatccaaggccttctcaggccggcttgagtgaattgtgtacctgaagtacagtatattcttgtaaatacataaaacaaaagcattttgctaaggagaagctaatatgattttttaagtctatgttttaaaataatatgtaaatttttcagctatttagtgatatattttatgggtgggaataaaatttctactacag

SEQ ID NO: 382 - DNA, 6633 bp, Homo sapiens
  ref <308>: DATABASE ACCESSION NUMBER: GenBank No. NM006206
  ref <309>: DATABASE ENTRY DATE: 2004-10-26
ttctccccgccccccagttgttgtcgaagtctgggggttgggactggaccccctgattgcgtaagagcaaaaagcgaaggcgcaatctggacactgggagattcggagcgcagggagtttgagagaaacttttattttgaagagaccaaggttgagggggggcttatttcctgacagctatttacttagagcaaatgattagttttagaaggatggactataacattgaatcaattacaaaacgcggtttttgagcccattactgttggagctacagggagagaaacaggaggagactgcaagagatcatttgggaaggccgtgggcacgctctttactccatgtgtgggacattcattgcggaataacatcggaggagaagtttcccagagctatggggacttcccatccggcgttcctggtcttaggctgtcttctcacagggctgagcctaatcctctgccagctttcattaccctctatccttccaaatgaaaatgaaaaggttgtgcagctgaattcatccttttctctgagatgctttggggagagtgaagtgagctggcagtaccccatgtctgaagaagagagctccgatgtggaaatcagaaatgaagaaaacaacagcggcctttttgtgacggtcttggaagtgagcagtgcctcggcggcccacacagggttgtacacttgctattacaaccacactcagacagaagagaatgagcttgaaggcaggcacatttacatctatgtgccagacccagatgtagcctttgtacctctaggaatgacggattatttagtcatcgtggaggatgatgattctgccattataccttgtcgcacaactgatcccgagactcctgtaaccttacacaacagtgagggggtggtacctgcctcctacgacagcagacagggctttaatgggaccttcactgtagggccctatatctgtgaggccaccgtcaaaggaaagaagttccagaccatcccatttaatgtttatgctttaaaagcaacatcagagctggatctagaaatggaagctcttaaaaccgtgtataagtcaggggaaacgattgtggtcacctgtgctgtttttaacaatgaggtggttgaccttcaatggacttaccctggagaagtgaaaggcaaaggcatcacaatgctggaagaaatcaaagtcccatccatcaaattggtgtacactttgacggtccccgaggccacggtgaaagacagtggagattacgaatgtgctgcccgccaggctaccagggaggtcaaagaaatgaagaaagtcactatttctgtccatgagaaaggtttcattgaaatcaaacccaccttcagccagttggaagctgtcaacctgcatgaagtcaaacattttgttgtagaggtgcgggcctacccacctcccaggatatcctggctgaaaaacaatctgactctgattgaaaatctcactgagatcaccactgatgtggaaaagattcaggaaataaggtatcgaagcaaattaaagctgatccgtgctaaggaagaagacagtggccattatactattgtagctcaaaatgaagatgctgtgaagagctatacttttgaactgttaactcaagttccttcatccattctggacttggtcgatgatcaccatggctcaactgggggacagacggtgaggtgcacagctgaaggcacgccgcttcctgatattgagtggatgatatgcaaagatattaagaaatgtaataatgaaacttcctggactattttggccaacaatgtctcaaacatcatcacggagatccactcccgagacaggagtaccgtggagggccgtgtgactttcgccaaagtggaggagaccatcgccgtgcgatgcctggctaagaatctccttggagctgagaaccgagagctgaagctggtggctcccaccctgcgttctgaactcacggtggctgctgcagtcctggtgctgttggtgattgtgatcatctcacttattgtcctggttgtcatttggaaacagaaaccgaggtatgaaattcgctggagggtcattgaatcaatcagcccggatggacatgaatatatttatgtggacccgatgcagctgccttatgactcaagatgggagtttccaagagatggactagtgcttggtcgggtcttggggtctggagcgtttgggaaggtggttgaaggaacagcctatggattaagccggtcccaacctgtcatgaaagttgcagtgaagatgctaaaacccacggccagatccagtgaaaaacaagctctcatgtctgaactgaagataatgactcacctggggccacatttgaacattgtaaacttgctgggagcctgcaccaagtcaggccccatttacatcatcacagagtattgcttctatggagatttggtcaactatttgcataagaatagggatagcttcctgagccaccacccagagaagccaaagaaagagctggatatctttggattgaaccctgctgatgaaagcacacggagctatgttattttatcttttgaaaacaatggtgactacatggacatgaagcaggctgatactacacagtatgtccccatgctagaaaggaaagaggtttctaaatattccgacatccagagatcactctatgatcgtccagcctcatataagaagaaatctatgttagactcagaagtcaaaaacctcctttcagatgataactcagaaggccttactttattggatttgttgagcttcacctatcaagttgcccgaggaatggagtttttggcttcaaaaaattgtgtccaccgtgatctggctgctcgcaacgtcctcctggcacaaggaaaaattgtgaagatctgtgactttggcctggccagagacatcatgcatgattcgaactatgtgtcgaaaggcagtacctttctgcccgtgaagtggatggctcctgagagcatctttgacaacctctacaccacactgagtgatgtctggtcttatggcattctgctctgggagatcttttcccttggtggcaccccttaccccggcatgatggtggattctactttctacaataagatcaagagtgggtaccggatggccaagcctgaccacgctaccagtgaagtctacgagatcatggtgaaatgctggaacagtgagccggagaagagaccctccttttaccacctgagtgagattgtggagaatctgctgcctggacaatataaaaagagttatgaaaaaattcacctggacttcctgaagagtgaccatcctgctgtggcacgcatgcgtgtggactcagacaatgcatacattggtgtcacctacaaaaacgaggaagacaagctgaaggactgggagggtggtctggatgagcagagactgagcgctgacagtggctacatcattcctctgcctgacattgaccctgtccctgaggaggaggacctgggcaagaggaacagacacagctcgcagacctctgaagagagtgccattgagacgggttccagcagttccaccttcatcaagagagaggacgagaccattgaagacatcgacatgatggacgacatcggcatagactcttcagacctggtggaagacagcttcctgtaactggcggattcgaggggttccttccacttctggggccacctctggatcccgttcagaaaaccactttattgcaatgcggaggttgagaggaggacttggttgatgtttaaagagaagttcccagccaagggcctcggggagcgttctaaatatgaatgaatgggatattttgaaatgaactttgtcagtgttgcctctcgcaatgcctcagtagcatctcagtggtgtgtgaagtttggagatagatggataagggaataataggccacagaaggtgaactttgtgcttcaaggacattggtgagagtccaacagacacaatttatactgcgacagaacttcagcattgtaattatgtaaataactctaaccaaggctgtgtttagattgtattaactatcttctttggacttctgaagagaccactcaatccatccatgtacttccctcttgaaacctgatgtcagctgctgttgaactttttaaagaagtgcatgaaaaaccatttttgaaccttaaaaggtactggtactatagcattttgctatcttttttagtgttaagagataaagaataataattaaccaaccttgtttaatagatttgggtcatttagaagcctgacaactcattttcatattgtaatctatgtttataatactactactgttatcagtaatgctaaatgtgtaataatgtaacatgatttccctccagagaaagcacaatttaaaacaatccttactaagtaggtgatgagtttgacagtttttgacatttatattaaataacatgtttctctataaagtatggtaatagctttagtgaattaaatttagttgagcatagagaacaaagtaaaagtagtgttgtccaggaagtcagaatttttaactgtactgaataggttccccaatccatcgtattaaaaaacaattaactgccctctgaaataatgggattagaaacaaacaaaactcttaagtcctaaaagttctcaatgtagaggcataaacctgtgctgaacataacttctcatgtatattacccaatggaaaatataatgatcagcaaaaagactggatttgcagaagttttttttttttttcttcatgcctgatgaaagctttggcaaccccaatatatgtattttttgaatctatgaacctgaaaagggtcagaaggatgcccagacatcagcctccttctttcaccccttaccccaaagagaaagagtttgaaactcgagaccataaagatattctttagtggaggctggatgtgcattagcctggatcctcagttctcaaatgtgtgtggcagccaggatgactagatcctgggtttccatccttgagattctgaagtatgaagtctgagggaaaccagagtctgtatttttctaaactccctggctgttctgatcggccagttttcggaaacactgacttaggtttcaggaagttgccatgggaaacaaataatttgaactttggaacagggttggaattcaaccacgcaggaagcctactatttaaatccttggcttcaggttagtgacatttaatgccatctagctagcaattgcgaccttaatttaactttccagtcttagctgaggctgagaaagctaaagtttggttttgacaggttttccaaaagtaaagatgctacttcccactgtatgggggagattgaactttccccgtctcccgtcttctgcctcccactccataccccgccaaggaaaggcatgtacaaaaattatgcaattcagtgttccaagtctctgtgtaaccagctcagtgttttggtggaaaaaacattttaagttttactgataatttgaggttagatgggaggatgaattgtcacatctatccacactgtcaaacaggttggtgtgggttcattggcattctttgcaatactgcttaattgctgataccatatgaatgaaacatgggctgtgattactgcaatcactgtgctatcggcagatgatgctttggaagatgcagaagcaataataaagtacttgactacctactggtgtaatctcaatgcaagccccaactttcttatccaactttttcatagtaagtgcgaagactgagccagattggccaattaaaaacgaaaacctgactaggttctgtagagccaattagacttgaaatacgtttgtgtttctagaatcacagctcaagcattctgtttatcgctcactctcccttgtacagccttattttgttggtgctttgcattttgatattgctgtgagccttgcatgacatcatgaggccggatgaaacttctcagtccagcagtttccagtcctaacaaatgctcccacctgaatttgtatatgactgcatttgtgggtgtgtgtgtgttttcagcaaattccagatttgtttccttttggcctcctgcaaagtctccagaagaaaatttgccaatctttcctactttctatttttatgatgacaatcaaagccggcctgagaaacactatttgtgactttttaaacgattagtgatgtccttaaaatgtggtctgccaatctgtacaaaatggtcctatttttgtgaagagggacataagataaaatgatgttatacatcaatatgtatatatgtatttctatatagacttggagaatactgccaaaacatttatgacaagctgtatcactgccttcgtttatatttttttaactgtgataatccccacaggcacattaactgttgcacttttgaatgtccaaaatttatattttagaaataataaaaagaaagatacttacatgttcccaaaacaatggtgtggtgaatgtgtgagaaaaactaacttgatagggtctaccaatacaaaatgtattacgaatgcccctgttcatgtttttgttttaaaacgtgtaaatgaagatctttatatttcaataaatgatatataatttaaagtt

SEQ ID NO: 383 - DNA, 5598 bp, Homo Sapiens
  ref <308>: DATABASE ACCESSION NUMBER: GenBank No. NM002609
  ref <309>: DATABASE ENTRY DATE: 2004-10-26
ggcccctcagccctgctgcccagcacgagcctgtgctcgccctgcccaacgcagacagccagacccagggcggcccctctggcggctctgctcctcccgaaggatgcttggggagtgaggcgaagctgggcgctcctctcccctacagcagcccccttcctccatccctctgttctcctgagccttcaggagcctgcaccagtcctgcctgtccttctactcagctgttacccactctgggaccagcagtctttctgataactgggagagggcagtaaggaggacttcctggagggggtgactgtccagagcctggaactgtgcccacaccagaagccatcagcagcaaggacaccatgcggcttccgggtgcgatgccagctctggccctcaaaggcgagctgctgttgctgtctctcctgttacttctggaaccacagatctctcagggcctggtcgtcacacccccggggccagagcttgtcctcaatgtctccagcaccttcgttctgacctgctcgggttcagctccggtggtgtgggaacggatgtcccaggagcccccacaggaaatggccaaggcccaggatggcaccttctccagcgtgctcacactgaccaacctcactgggctagacacgggagaatacttttgcacccacaatgactcccgtggactggagaccgatgagcggaaacggctctacatctttgtgccagatcccaccgtgggcttcctccctaatgatgccgaggaactattcatctttctcacggaaataactgagatcaccattccatgccgagtaacagacccacagctggtggtgacactgcacgagaagaaaggggacgttgcactgcctgtcccctatgatcaccaacgtggcttttctggtatctttgaggacagaagctacatctgcaaaaccaccattggggacagggaggtggattctgatgcctactatgtctacagactccaggtgtcatccatcaacgtctctgtgaacgcagtgcagactgtggtccgccagggtgagaacatcaccctcatgtgcattgtgatcgggaatgaggtggtcaacttcgagtggacatacccccgcaaagaaagtgggcggctggtggagccggtgactgacttcctcttggatatgccttaccacatccgctccatcctgcacatccccagtgccgagttagaagactcggggacctacacctgcaatgtgacggagagtgtgaatgaccatcaggatgaaaaggccatcaacatcaccgtggttgagagcggctacgtgcggctcctgggagaggtgggcacactacaatttgctgagctgcatcggagccggacactgcaggtagtgttcgaggcctacccaccgcccactgtcctgtggttcaaagacaaccgcaccctgggcgactccagcgctggcgaaatcgccctgtccacgcgcaacgtgtcggagacccggtatgtgtcagagctgacactggttcgcgtgaaggtggcagaggctggccactacaccatgcgggccttccatgaggatgctgaggtccagctctccttccagctacagatcaatgtccctgtccgagtgctggagctaagtgagagccaccctgacagtggggaacagacagtccgctgtcgtggccggggcatgccccagccgaacatcatctggtctgcctgcagagacctcaaaaggtgtccacgtgagctgccgcccacgctgctggggaacagttccgaagaggagagccagctggagactaacgtgacgtactgggaggaggagcaggagtttgaggtggtgagcacactgcgtctgcagcacgtggatcggccactgtcggtgcgctgcacgctgcgcaacgctgtgggccaggacacgcaggaggtcatcgtggtgccacactccttgccctttaaggtggtggtgatctcagccatcctggccctggtggtgctcaccatcatctcccttatcatcctcatcatgctttggcagaagaagccacgttacgagatccgatggaaggtgattgagtctgtgagctctgacggccatgagtacatctacgtggaccccatgcagctgccctatgactccacgtgggagctgccgcgggaccagcttgtgctgggacgcaccctcggctctggggcctttgggcaggtggtggaggccacggctcatggcctgagccattctcaggccacgatgaaagtggccgtcaagatgcttaaatccacagcccgcagcagtgagaagcaagcccttatgtcggagctgaagatcatgagtcaccttgggccccacctgaacgtggtcaacctgttgggggcctgcaccaaaggaggacccatctatatcatcactgagtactgccgctacggagacctggtggactacctgcaccgcaacaaacacaccttcctgcagcaccactccgacaagcgccgcccgcccagcgcggagctctacagcaatgctctgcccgttgggctccccctgcccagccatgtgtccttgaccggggagagcgacggtggctacatggacatgagcaaggacgagtcggtggactatgtgcccatgctggacatgaaaggagacgtcaaatatgcagacatcgagtcctccaactacatggccccttacgataactacgttccctctgcccctgagaggacctgccgagcaactttgatcaacgagtctccagtgctaagctacatggacctcgtgggcttcagctaccaggtggccaatggcatggagtttctggcctccaagaactgcgtccacagagacctggcggctaggaacgtgctcatctgtgaaggcaagctggtcaagatctgtgactttggcctggctcgagacatcatgcgggactcgaattacatctccaaaggcagcacctttttgcctttaaagtggatggctccggagagcatcttcaacagcctctacaccaccctgagcgacgtgtggtccttcgggatcctgctctgggagatcttcaccttgggtggcaccccttacccagagctgcccatgaacgagcagttctacaatgccatcaaacggggttaccgcatggcccagcctgcccatgcctccgacgagatctatgagatcatgcagaagtgctgggaagagaagtttgagattcggccccccttctcccagctggtgctgcttctcgagagactgttgggcgaaggttacaaaaagaagtaccagcaggtggatgaggagtttctgaggagtgaccacccagccatccttcggtcccaggcccgcttgcctgggttccatggcctccgatctcccctggacaccagctccgtcctctatactgccgtgcagcccaatgagggtgacaacgactatatcatccccctgcctgaccccaaacccgaggttgctgacgagggcccactggagggttcccccagcctagccagctccaccctgaatgaagtcaacacctcctcaaccatctcctgtgacagccccctggagccccaggacgaaccagagccagagccccagcttgagctccaggtggagccggagccagagctggaacagttgccggattcggggtgccctgcgcctcgggcggaagcagaggatagcttcctgtagggggctggcccctaccctgccctgcctgaagctccccccctgccagcacccagcatctcctggcctggcctgaccgggcttcctgtcagccaggctgcccttatcagctgtccccttctggaagctttctgctcctgacgtgttgtgccccaaaccctggggctggcttaggaggcaagaaaactgcaggggccgtgaccagccctctgcctccagggaggccaactgactctgagccagggttcccccagggaactcagttttcccatatgtaagatgggaaagttaggcttgatgacccagaatctaggattctctccctggctgacaggtggggagaccgaatccctccctgggaagattcttggagttactgaggtggtaaattaacttttttctgttcagccagctacccctcaaggaatcatagctctctcctcgcactttttatccacccaggagctagggaagagaccctagcctccctggctgctggctgagctagggcctagccttgagcagtgttgcctcatccagaagaaagccagtctcctccctatgatgccagtccctgcgttccctggcccgagctggtctggggccattaggcagcctaattaatgctggaggctgagccaagtacaggacacccccagcctgcagcccttgcccagggcacttggagcacacgcagccatagcaagtgcctgtgtccctgtccttcaggcccatcagtcctggggctttttctttatcaccctcagtcttaatccatccaccagagtctagaaggccagacgggccccgcatctgtgatgagaatgtaaatgtgccagtgtggagtggccacgtgtgtgtgccagtatatggccctggctctgcattggacctgctatgaggctttggaggaatccctcaccctctctgggcctcagtttccccttcaaaaaatgaataagtcggacttattaactctgagtgccttgccagcactaacattctagagtattccaggtggttgcacatttgtccagatgaagcaaggccatataccctaaacttccatcctgggggtcagctgggctcctgggagattccagatcacacatcacactctggggactcaggaaccatgccccttccccaggcccccagcaagtctcaagaacacagctgcacaggccttgacttagagtgacagccggtgtcctggaaagccccaagcagctgccccagggacatgggaagaccacgggacctctttcactacccacgatgacctccgggggtatcctgggcaaaagggacaaagagggcaaatgagatcacctcctgcagcccaccactccagcacctgtgccgaggtctgcgtcgaagacagaatggacagtgaggacagttatgtcttgtaaaagacaagaagcttcagatggtaccccaagaaggatgtgagaggtggccgcttggagtttgcccctcacccaccagctgccccatccctgaggcagcgctccatgggggtatggttttgtcactgcccagacctagcagtgacatctcattgtccccagcccagtgggcattggaggtgccaggggagtcagggttgtagccaagacgcccccgcacggggagggttgggaagggggtgcaggaagctcaacccctctgggcaccaaccctgcattgcaggttggcaccttacttccctgggatccccagagttggtccaaggagggagagtgggttctcaatacggtaccaaagatataatcacctaggtttacaaatatttttaggactcacgttaactcacatttatacagcagaaatgctattttgtatgctgttaagtttttctatctgtgtacttttttttaagggaaagattttaatattaaacctggtgcttctcactcac

SEQ ID NO: 384 - DNA, 1414 bp, Homo sapiens
  ref <308>: DATABASE ACCESSION NUMBER: GenBank No. NM001136
  ref <309>: DATABASE ENTRY DATE: 2005-10-31
gccaggaccctggaaggaagcaggatggcagccggaacagcagttggagcctgggtgctggtcctcagtctgtggggggcagtagtaggtgctcaaaacatcacagcccggattggcgagccactggtgctgaagtgtaagggggcccccaagaaaccaccccagcggctggaatggaaactgaacacaggccggacagaagcttggaaggtcctgtctccccagggaggaggcccctgggacagtgtggctcgtgtccttcccaacggctccctcttccttccggctgtcgggatccaggatgaggggattttccggtgccaggcaatgaacaggaatggaaaggagaccaagtccaactaccgagtccgtgtctaccagattcctgggaagccagaaattgtagattctgcctctgaactcacggctggtgttcccaataaggtggggacatgtgtgtcagagggaagctaccctgcagggactcttagctggcacttggatgggaagcccctggtgcctaatgagaagggagtatctgtgaaggaacagaccaggagacaccctgagacagggctcttcacactgcagtcggagctaatggtgaccccagcccggggaggagatccccgtcccaccttctcctgtagcttcagcccaggccttccccgacaccgggccttgcgcacagcccccatccagccccgtgtctgggagcctgtgcctctggaggaggtccaattggtggtggagccagaaggtggagcagtagctcctggtggaaccgtaaccctgacctgtgaagtccctgcccagccctctcctcaaatccactggatgaaggatggtgtgcccttgccccttccccccagccctgtgctgatcctccctgagatagggcctcaggaccagggaacctacagctgtgtggccacccattccagccacgggccccaggaaagccgtgctgtcagcatcagcatcatcgaaccaggcgaggaggggccaactgcaggctctgtgggaggatcagggctgggaactctagccctggccctggggatcctgggaggcctggggacagccgccctgctcattggggtcatcttgtggcaaaggcggcaacgccgaggagaggagaggaaggccccagaaaaccaggaggaagaggaggagcgtgcagaactgaatcagtcggaggaacctgaggcaggcgagagtagtactggagggccttgaggggcccacagacagatcccatccatcagctcccttttctttttcccttgaactgttctggcctcagaccaactctctcctgtataatctctctcctgtataaccccaccttgccaagctttcttctacaaccagagccccccacaatgatgattaaacacctgacacatcttga

SEQ ID NO: 385 - DNA, 4138 bp, Homo Sapiens
  ref <308>: DATABASE ACCESSION NUMBER: GenBank No. NM000459
  ref <309>: DATABASE ENTRY DATE: 2004-10-26
cttctgtgctgttccttcttgcctctaacttgtaaacaagacgtactaggacgatgctaatggaaagtcacaaaccgctgggtttttgaaaggatccttgggacctcatgcacatttgtggaaactggatggagagatttggggaagcatggactctttagccagcttagttctctgtggagtcagcttgctcctttctggaactgtggaaggtgccatggacttgatcttgatcaattccctacctcttgtatctgatgctgaaacatctctcacctgcattgcctctgggtggcgcccccatgagcccatcaccataggaagggactttgaagccttaatgaaccagcaccaggatccgctggaagttactcaagatgtgaccagagaatgggctaaaaaagttgtttggaagagagaaaaggctagtaagatcaatggtgcttatttctgtgaagggcgagttcgaggagaggcaatcaggatacgaaccatgaagatgcgtcaacaagcttccttcctaccagctactttaactatgactgtggacaagggagataacgtgaacatatctttcaaaaaggtattgattaaagaagaagatgcagtgatttacaaaaatggttccttcatccattcagtgccccggcatgaagtacctgatattctagaagtacacctgcctcatgctcagccccaggatgctggagtgtactcggccaggtatataggaggaaacctcttcacctcggccttcaccaggctgatagtccggagatgtgaagcccagaagtggggacctgaatgcaaccatctctgtactgcttgtatgaacaatggtgtctgccatgaagatactggagaatgcatttgccctcctgggtttatgggaaggacgtgtgagaaggcttgtgaactgcacacgtttggcagaacttgtaaagaaaggtgcagtggacaagagggatgcaagtcttatgtgttctgtctccctgacccctatgggtgttcctgtgccacaggctggaagggtctgcagtgcaatgaagcatgccaccctggtttttacgggccagattgtaagcttaggtgcagctgcaacaatggggagatgtgtgatcgcttccaaggatgtctctgctctccaggatggcaggggctccagtgtgagagagaaggcataccgaggatgaccccaaagatagtggatttgccagatcatatagaagtaaacagtggtaaatttaatcccatttgcaaagcttctggctggccgctacctactaatgaagaaatgaccctggtgaagccggatgggacagtgctccatccaaaagactttaaccatacggatcatttctcagtagccatattcaccatccaccggatcctcccccctgactcaggagtttgggtctgcagtgtgaacacagtggctgggatggtggaaaagcccttcaacatttctgttaaagttcttccaaagcccctgaatgccccaaacgtgattgacactggacataactttgctgtcatcaacatcagctctgagccttactttggggatggaccaatcaaatccaagaagcttctatacaaacccgttaatcactatgaggcttggcaacatattcaagtgacaaatgagattgttacactcaactatttggaacctcggacagaatatgaactctgtgtgcaactggtccgtcgtggagagggtggggaagggcatcctggacctgtgagacgcttcacaacagcttctatcggactccctcctccaagaggtctaaatctcctgcctaaaagtcagaccactctaaatttgacctggcaaccaatatttccaagctcggaagatgacttttatgttgaagtggagagaaggtctgtgcaaaaaagtgatcagcagaatattaaagttccaggcaacttgacttcggtgctacttaacaacttacatcccagggagcagtacgtggtccgagctagagtcaacaccaaggcccagggggaatggagtgaagatctcactgcttggacccttagtgacattcttcctcctcaaccagaaaacatcaagatttccaacattacacactcctcggctgtgatttcttggacaatattggatggctattctatttcttctattactatccgttacaaggttcaaggcaagaatgaagaccagcacgttgatgtgaagataaagaatgccaccatcattcagtatcagctcaagggcctagagcctgaaacagcataccaggtggacatttttgcagagaacaacatagggtcaagcaacccagccttttctcatgaactggtgaccctcccagaatctcaagcaccagcggacctcggaggggggaagatgctgcttatagccatccttggctctgctggaatgacctgcctgactgtgctgttggcctttctgatcatattgcaattgaagagggcaaatgtgcaaaggagaatggcccaagccttccaaaacgtgagggaagaaccagctgtgcagttcaactcagggactctggccctaaacaggaaggtcaaaaacaacccagatcctacaatttatccagtgcttgactggaatgacatcaaatttcaagatgtgattggggagggcaattttggccaagttcttaaggcgcgcatcaagaaggatgggttacggatggatgctgccatcaaaagaatgaaagaatatgcctccaaagatgatcacagggactttgcaggagaactggaagttctttgtaaacttggacaccatccaaacatcatcaatctcttaggagcatgtgaacatcgaggctacttgtacctggccattgagtacgcgccccatggaaaccttctggacttccttcgcaagagccgtgtgctggagacggacccagcatttgccattgccaatagcaccgcgtccacactgtcctcccagcagctccttcacttcgctgccgacgtggcccggggcatggactacttgagccaaaaacagtttatccacagggatctggctgccagaaacattttagttggtgaaaactatgtggcaaaaatagcagattttggattgtcccgaggtcaagaggtgtacgtgaaaaagacaatgggaaggctcccagtgcgctggatggccatcgagtcactgaattacagtgtgtacacaaccaacagtgatgtatggtcctatggtgtgttactatgggagattgttagcttaggaggcacaccctactgcgggatgacttgtgcagaactctacgagaagctgccccagggctacagactggagaagcccctgaactgtgatgatgaggtgtatgatctaatgagacaatgctggcgggagaagccttatgagaggccatcatttgcccagatattggtgtccttaaacagaatgttagaggagcgaaagacctacgtgaataccacgctttatgagaagtttacttatgcaggaattgactgttctgctgaagaagcggcctaggacagaacatctgtataccctctgtttccctttcactggcatgggagacccttgacaactgctgagaaaacatgcctctgccaaaggatgtgatatataagtgtacatatgtgctggaattctaacaagtcataggttaatatttaagacactgaaaaatctaagtgatataaatcagattcttctctctcattttatccctcacctgtagcatgccagtcccgtttcatttagtcatgtgaccactctgtcttgtgtttccacagcctgcaagttcagtccaggatgctaacatctaaaaatagacttaaatctcattgcttacaagcctaagaatctttagagaagtatacataagtttaggataaaataatgggattttcttttcttttctctggtaatattgacttgtatattttaagaaataacagaaagcctgggtgacatttgggagacatgtgacatttatatattgaattaatatccctacatgtattgcacattgtaaaaagttttagttttgatgagttgtgagtttaccttgtatactgtaggcacactttgcactgatatatcatgagtgaataaatgtcttgcctactcaaaaaaaaaaaa

SEQ ID NO: 386 - DNA, 3960 bp, Homo Sapiens
  ref <308>: DATABASE ACCESSION NUMBER: GenBank No. NM005424
  ref <309>: DATABASE ENTRY DATE: 2004-12-18
cacaggctgagcagtcaggcccacagcatctgaccccaggcccagctcgtcctggctggcctgggtcggcctctggagtatggtctggcgggtgccccctttcttgctccccatcctcttcttggcttctcatgtgggcgcggcggtggacctgacgctgctggccaacctgcggctcacggacccccagcgcttcttcctgacttgcgtgtctggggaggccggggcggggaggggctcggacgcctggggcccgcccctgctgctggagaaggacgaccgtatcgtgcgcaccccgcccgggccacccctgcgcctggcgcgcaacggttcgcaccaggtcacgcttcgcggcttctccaagccctcggacctcgtgggcgtcttctcctgcgtgggcggtgctggggcgcggcgcacgcgcgtcatctacgtgcacaacagccctggagcccacctgcttccagacaaggtcacacacactgtgaacaaaggtgacaccgctgtactttctgcacgtgtgcacaaggagaagcagacagacgtgatctggaagagcaacggatcctacttctacaccctggactggcatgaagcccaggatgggcggttcctgctgcagctcccaaatgtgcagccaccatcgagcggcatctacagtgccacttacctggaagccagccccctgggcagcgccttctttcggctcatcgtgcggggttgtggggctgggcgctgggggccaggctgtaccaaggagtgcccaggttgcctacatggaggtgtctgccacgaccatgacggcgaatgtgtatgcccccctggcttcactggcacccgctgtgaacaggcctgcagagagggccgttttgggcagagctgccaggagcagtgcccaggcatatcaggctgccggggcctcaccttctgcctcccagacccctatggctgctcttgtggatctggctggagaggaagccagtgccaagaagcttgtgcccctggtcattttggggctgattgccgactccagtgccagtgtcagaatggtggcacttgtgaccggttcagtggttgtgtctgcccctctgggtggcatggagtgcactgtgagaagtcagaccggatcccccagatcctcaacatggcctcagaactggagttcaacttagagacgatgccccggatcaactgtgcagctgcagggaaccccttccccgtgcggggcagcatagagctacgcaagccagacggcactgtgctcctgtccaccaaggccattgtggagccagagaagaccacagctgagttcgaggtgccccgcttggttcttgcggacagtgggttctgggagtgccgtgtgtccacatctggcggccaagacagccggcgcttcaaggtcaatgtgaaagtgccccccgtgcccctggctgcacctcggctcctgaccaagcagagccgccagcttgtggtctccccgctggtctcgttctctggggatggacccatctccactgtccgcctgcactaccggccccaggacagtaccatggactggtcgaccattgtggtggaccccagtgagaacgtgacgttaatgaacctgaggccaaagacaggatacagtgttcgtgtgcagctgagccggccaggggaaggaggagagggggcctgggggcctcccaccctcatgaccacagactgtcctgagcctttgttgcagccgtggttggagggctggcatgtggaaggcactgaccggctgcgagtgagctggtccttgcccttggtgcccgggccactggtgggcgacggtttcctgctgcgcctgtgggacgggacacgggggcaggagcggcgggagaacgtctcatccccccaggcccgcactgccctcctgacgggactcacgcctggcacccactaccagctggatgtgcagctctaccactgcaccctcctgggcccggcctcgccccctgcacacgtgcttctgccccccagtgggcctccagccccccgacacctccacgcccaggccctctcagactccgagatccagctgacatggaagcacccggaggctctgcctgggccaatatccaagtacgttgtggaggtgcaggtggctgggggtgcaggagacccactgtggatagacgtggacaggcctgaggagacaagcaccatcatccgtggcctcaacgccagcacgcgctacctcttccgcatgcgggccagcattcaggggctcggggactggagcaacacagtagaagagtccaccctgggcaacgggctgcaggctgagggcccagtccaagagagccgggcagctgaagagggcctggatcagcagctgatcctggcggtggtgggctccgtgtctgccacctgcctcaccatcctggccgcccttttaaccctggtgtgcatccgcagaagctgcctgcatcggagacgcaccttcacctaccagtcaggctcgggcgaggagaccatcctgcagttcagctcagggaccttgacacttacccggcggccaaaactgcagcccgagcccctgagctacccagtgctagagtgggaggacatcacctttgaggacctcatcggggaggggaacttcggccaggtcatccgggccatgatcaagaaggacgggctgaagatgaacgcagccatcaaaatgctgaaagagtatgcctctgaaaatgaccatcgtgactttgcgggagaactggaagttctgtgcaaattggggcatcaccccaacatcatcaacctcctgggggcctgtaagaaccgaggttacttgtatatcgctattgaatatgccccctacgggaacctgctagattttctgcggaaaagccgggtcctagagactgacccagcttttgctcgagagcatgggacagcctctacccttagctcccggcagctgctgcgtttcgccagtgatgcggccaatggcatgcagtacctgagtgagaagcagttcatccacagggacctggctgcccggaatgtgctggtcggagagaacctagcctccaagattgcagacttcggcctttctcggggagaggaggtttatgtgaagaagacgatggggcgtctccctgtgcgctggatggccattgagtccctgaactacagtgtctataccaccaagagtgatgtctggtcctttggagtccttctttgggagatagtgagccttggaggtacaccctactgtggcatgacctgtgccgagctctatgaaaagctgccccagggctaccgcatggagcagcctcgaaactgtgacgatgaagtgtacgagctgatgcgtcagtgctggcgggaccgtccctatgagcgacccccctttgcccagattgcgctacagctaggccgcatgctggaagccaggaaggcctatgtgaacatgtcgctgtttgagaacttcacttacgcgggcattgatgccacagctgaggaggcctgagctgccatccagccagaacgtggctctgctggccggagcaaactctgctgtctaacctgtgaccagtctgacccttacagcctctgacttaagctgcctcaaggaatttttttaacttaagggagaaaaaaagggatctggggatggggtgggcttaggggaactgggttcccatgctttgtaggtgtctcatagctatcctgggcatccttctttctagttcagctgccccacaggtgtgtttcccatcccactgctcccccaacacaaacccccactccagctccttcgcttaagccagcactcacaccactaacatgccctgttcagctactcccactcccggcctgtcattcagaaaaaaataaatgttctaataagctccaaaaaaaaaaaaaaaaaaaaaaaaaaaaaaaaaaaaaaaaaaaaaaaaaaaaaaaaaaaaaaaaaaaaaaaaaaaaaaa

SEQ ID NO: 387 - DNA, 3682 bp, Homo Sapiens
  ref <308>: DATABASE ACCESSION NUMBER: GenBank NM_001066
  ref <309>: DATABASE ENTRY DATE: 2003-12-20
gcgagcgcagcggagcctggagagaaggcgctgggctgcgagggcgcgagggcgcgagggcagggggcaaccggaccccgcccgcacccatggcgcccgtcgccgtctgggccgcgctggccgtcggactggagctctgggctgcggcgcacgccttgcccgcccaggtggcatttacaccctacgccccggagcccgggagcacatgccggctcagagaatactatgaccagacagctcagatgtgctgcagcaaatgctcgccgggccaacatgcaaaagtcttctgtaccaagacctcggacaccgtgtgtgactcctgtgaggacagcacatacacccagctctggaactgggttcccgagtgcttgagctgtggctcccgctgtagctctgaccaggtggaaactcaagcctgcactcgggaacagaaccgcatctgcacctgcaggcccggctggtactgcgcgctgagcaagcaggaggggtgccggctgtgcgcgccgctgcgcaagtgccgcccgggcttcggcgtggccagaccaggaactgaaacatcagacgtggtgtgcaagccctgtgccccggggacgttctccaacacgacttcatccacggatatttgcaggccccaccagatctgtaacgtggtggccatccctgggaatgcaagcatggatgcagtctgcacgtccacgtcccccacccggagtatggccccaggggcagtacacttaccccagccagtgtccacacgatcccaacacacgcagccaactccagaacccagcactgctccaagcacctccttcctgctcccaatgggccccagccccccagctgaagggagcactggcgacttcgctcttccagttggactgattgtgggtgtgacagccttgggtctactaataataggagtggtgaactgtgtcatcatgacccaggtgaaaaagaagcccttgtgcctgcagagagaagccaaggtgcctcacttgcctgccgataaggcccggggtacacagggccccgagcagcagcacctgctgatcacagcgccgagctccagcagcagctccctggagagctcggccagtgcgttggacagaagggcgcccactcggaaccagccacaggcaccaggcgtggaggccagtggggccggggaggcccgggccagcaccgggagctcagattcttcccctggtggccatgggacccaggtcaatgtcacctgcatcgtgaacgtctgtagcagctctgaccacagctcacagtgctcctcccaagccagctccacaatgggagacacagattccagcccctcggagtccccgaaggacgagcaggtccccttctccaaggaggaatgtgcctttcggtcacagctggagacgccagagaccctgctggggagcaccgaagagaagcccctgccccttggagtgcctgatgctgggatgaagcccagttaaccaggccggtgtgggctgtgtcgtagccaaggtgggctgagccctggcaggatgaccctgcgaaggggccctggtccttccaggcccccaccactaggactctgaggctctttctgggccaagttcctctagtgccctccacagccgcagcctccctctgacctgcaggccaagagcagaggcagcgagttgtggaaagcctctgctgccatggcgtgtccctctcggaaggctggctgggcatggacgttcggggcatgctggggcaagtccctgactctctgtgacctgccccgcccagctgcacctgccagcctggcttctggagcccttgggttttttgtttgtttgtttgtttgtttgtttgtttctccccctgggctctgccccagctctggcttccagaaaaccccagcatccttttctgcagaggggctttctggagaggagggatgctgcctgagtcacccatgaagacaggacagtgcttcagcctgaggctgagactgcgggatggtcctggggctctgtgcagggaggaggtggcagccctgtagggaacggggtccttcaagttagctcaggaggcttggaaagcatcacctcaggccaggtgcagtggctcacgcctatgatcccagcactttgggaggctgaggcgggtggatcacctgaggttaggagttcgagaccagcctggccaacatggtaaaaccccatctctactaaaaatacagaaattagccgggcgtggtggcgggcacctatagtcccagctactcagaagcctgaggctgggaaatcgtttgaacccgggaagcggaggttgcagggagccgagatcacgccactgcactccagcctgggcgacagagcgagagtctgtctcaaaagaaaaaaaaaagcaccgcctccaaatgccaacttgtccttttgtaccatggtgtgaaagtcagatgcccagagggcccaggcaggccaccatattcagtgctgtggcctgggcaagataacgcacttctaactagaaatctgccaattttttaaaaaagtaagtaccactcaggccaacaagccaacgacaaagccaaactctgccagccacatccaaccccccacctgccatttgcaccctccgccttcactccggtgtgcctgcagccccgcgcctccttccttgctgtcctaggccacaccatctcctttcagggaatttcaggaactagagatgactgagtcctcgtagccatctctctactcctacctcagcctagaccctcctcctcccccagaggggtgggttcctcttccccactccccaccttcaattcctgggccccaaacgggctgccctgccactttggtacatggccagtgtgatcccaagtgccagtcttgtgtctgcgtctgtgttgcgtgtcgtgggtgtgtgtagccaaggtcggtaagttgaatggcctgccttgaagccactgaagctgggattcctccccattagagtcagccttccccctcccagggccagggccctgcagaggggaaaccagtgtagccttgcccggattctgggaggaagcaggttgaggggctcctggaaaggctcagtctcaggagcatggggataaaggagaaggcatgaaattgtctagcagagcaggggcagggtgataaattgttgataaattccactggacttgagcttggcagctgaactattggagggtgggagagcccagccattaccatggagacaagaagggttttccaccctggaatcaagatgtcagactggctggctgcagtgacgtgcacctgtactcaggaggctgaggggaggatcactggagcccaggagtttgaggctgcagcgagctatgatcgcgccactacactccagcctgagcaacagagtgagaccctgtctcttaaagaaaaaaaaagtcagactgctgggactggccaggtttctgcccacattggacccacatgaggacatgatggagcgcacctgccccctggtggacagtcctgggagaacctcaggcttccttggcatcacagggcagagccgggaagcgatgaatttggagactctgtggggccttggttcccttgtgtgtgtgtgttgatcccaagacaatgaaagtttgcactgtatgctggacggcattcctgcttatcaataaacctgtttgttttaaaaaaaa

SEQ ID NO: 388 - DNA, 2236 bp, Homo sapiens
  ref <308>: DATABASE ACCESSION NUMBER: GenBank No. NM001065
  ref <309>: DATABASE ENTRY DATE: 2004-10-27
gctgttgcaacactgcctcactcttcccctcccaccttctctcccctcctctctgctttaattttctcagaattctctggactgaggctccagttctggcctttggggttcaagatcactgggaccaggccgtgatctctatgcccgagtctcaaccctcaactgtcaccccaaggcacttgggacgtcctggacagaccgagtcccgggaagccccagcactgccgctgccacactgccctgagcccaaatgggggagtgagaggccatagctgtctggcatgggcctctccaccgtgcctgacctgctgctgccactggtgctcctggagctgttggtgggaatatacccctcaggggttattggactggtccctcacctaggggacagggagaagagagatagtgtgtgtccccaaggaaaatatatccaccctcaaaataattcgatttgctgtaccaagtgccacaaaggaacctacttgtacaatgactgtccaggcccggggcaggatacggactgcagggagtgtgagagcggctccttcaccgcttcagaaaaccacctcagacactgcctcagctgctccaaatgccgaaaggaaatgggtcaggtggagatctcttcttgcacagtggaccgggacaccgtgtgtggctgcaggaagaaccagtaccggcattattggagtgaaaaccttttccagtgcttcaattgcagcctctgcctcaatgggaccgtgcacctctcctgccaggagaaacagaacaccgtgtgcacctgccatgcaggtttctttctaagagaaaacgagtgtgtctcctgtagtaactgtaagaaaagcctggagtgcacgaagttgtgcctaccccagattgagaatgttaagggcactgaggactcaggcaccacagtgctgttgcccctggtcattttctttggtctttgccttttatccctcctcttcattggtttaatgtatcgctaccaacggtggaagtccaagctctactccattgtttgtgggaaatcgacacctgaaaaagagggggagcttgaaggaactactactaagcccctggccccaaacccaagcttcagtcccactccaggcttcacccccaccctgggcttcagtcccgtgcccagttccaccttcacctccagctccacctatacccccggtgactgtcccaactttgcggctccccgcagagaggtggcaccaccctatcagggggctgaccccatccttgcgacagccctcgcctccgaccccatccccaacccccttcagaagtgggaggacagcgcccacaagccacagagcctagacactgatgaccccgcgacgctgtacgccgtggtggagaacgtgcccccgttgcgctggaaggaattcgtgcggcgcctagggctgagcgaccacgagatcgatcggctggagctgcagaacgggcgctgcctgcgcgaggcgcaatacagcatgctggcgacctggaggcggcgcacgccgcggcgcgaggccacgctggagctgctgggacgcgtgctccgcgacatggacctgctgggctgcctggaggacatcgaggaggcgctttgcggccccgccgccctcccgcccgcgcccagtcttctcagatgaggctgcgcccctgcgggcagctctaaggaccgtcctgcgagatcgccttccaaccccacttttttctggaaaggaggggtcctgcaggggcaagcaggagctagcagccgcctacttggtgctaacccctcgatgtacatagcttttctcagctgcctgcgcgccgccgacagtcagcgctgtgcgcgcggagagaggtgcgccgtgggctcaagagcctgagtgggtggtttgcgaggatgagggacgctatgcctcatgcccgttttgggtgtcctcaccagcaaggctgctcgggggcccctggttcgtccctgagcctttttcacagtgcataagcagttttttttgtttttgttttgttttgttttgtttttaaatcaatcatgttacactaatagaaacttggcactcctgtgccctctgcctggacaagcacatagcaagctgaactgtcctaaggcaggggcgagcacggaacaatggggccttcagctggagctgtggacttttgtacatacactaaaattctgaagttaaagctctgctcttggaaaaaaaaaaaaaaaaaaaaaaaaaaaaaaaaa

SEQ ID NO: 389 - DNA, 5777 bp, Homo Sapiens
  ref <308>: DATABASE ACCESSION NUMBER: GenBank No. NM002019
  ref <309>: DATABASE ENTRY DATE: 2004-10-28
gcggacactcctctcggctcctccccggcagcggcggcggctcggagcgggctccggggctcgggtgcagcggccagcgggcctggcggcgaggattacccggggaagtggttgtctcctggctggagccgcgagacgggcgctcagggcgcggggccggcggcggcgaacgagaggacggactctggcggccgggtcgttggccgggggagcgcgggcaccgggcgagcaggccgcgtcgcgctcaccatggtcagctactgggacaccggggtcctgctgtgcgcgctgctcagctgtctgcttctcacaggatctagttcaggttcaaaattaaaagatcctgaactgagtttaaaaggcacccagcacatcatgcaagcaggccagacactgcatctccaatgcaggggggaagcagcccataaatggtctttgcctgaaatggtgagtaaggaaagcgaaaggctgagcataactaaatctgcctgtggaagaaatggcaaacaattctgcagtactttaaccttgaacacagctcaagcaaaccacactggcttctacagctgcaaatatctagctgtacctacttcaaagaagaaggaaacagaatctgcaatctatatatttattagtgatacaggtagacctttcgtagagatgtacagtgaaatccccgaaattatacacatgactgaaggaagggagctcgtcattccctgccgggttacgtcacctaacatcactgttactttaaaaaagtttccacttgacactttgatccctgatggaaaacgcataatctgggacagtagaaagggcttcatcatatcaaatgcaacgtacaaagaaatagggcttctgacctgtgaagcaacagtcaatgggcatttgtataagacaaactatctcacacatcgacaaaccaatacaatcatagatgtccaaataagcacaccacgcccagtcaaattacttagaggccatactcttgtcctcaattgtactgctaccactcccttgaacacgagagttcaaatgacctggagttaccctgatgaaaaaaataagagagcttccgtaaggcgacgaattgaccaaagcaattcccatgccaacatattctacagtgttcttactattgacaaaatgcagaacaaagacaaaggactttatacttgtcgtgtaaggagtggaccatcattcaaatctgttaacacctcagtgcatatatatgataaagcattcatcactgtgaaacatcgaaaacagcaggtgcttgaaaccgtagctggcaagcggtcttaccggctctctatgaaagtgaaggcatttccctcgccggaagttgtatggttaaaagatgggttacctgcgactgagaaatctgctcgctatttgactcgtggctactcgttaattatcaaggacgtaactgaagaggatgcagggaattatacaatcttgctgagcataaaacagtcaaatgtgtttaaaaacctcactgccactctaattgtcaatgtgaaaccccagatttacgaaaaggccgtgtcatcgtttccagacccggctctctacccactgggcagcagacaaatcctgacttgtaccgcatatggtatccctcaacctacaatcaagtggttctggcacccctgtaaccataatcattccgaagcaaggtgtgacttttgttccaataatgaagagtcctttatcctggatgctgacagcaacatgggaaacagaattgagagcatcactcagcgcatggcaataatagaaggaaagaataagatggctagcaccttggttgtggctgactctagaatttctggaatctacatttgcatagcttccaataaagttgggactgtgggaagaaacataagcttttatatcacagatgtgccaaatgggtttcatgttaacttggaaaaaatgccgacggaaggagaggacctgaaactgtcttgcacagttaacaagttcttatacagagacgttacttggattttactgcggacagttaataacagaacaatgcactacagtattagcaagcaaaaaatggccatcactaaggagcactccatcactcttaatcttaccatcatgaatgtttccctgcaagattcaggcacctatgcctgcagagccaggaatgtatacacaggggaagaaatcctccagaagaaagaaattacaatcagagatcaggaagcaccatacctcctgcgaaacctcagtgatcacacagtggccatcagcagttccaccactttagactgtcatgctaatggtgtccccgagcctcagatcacttggtttaaaaacaaccacaaaatacaacaagagcctggaattattttaggaccaggaagcagcacgctgtttattgaaagagtcacagaagaggatgaaggtgtctatcactgcaaagccaccaaccagaagggctctgtggaaagttcagcatacctcactgttcaaggaacctcggacaagtctaatctggagctgatcactctaacatgcacctgtgtggctgcgactctcttctggctcctattaaccctccttatccgaaaaatgaaaaggtcttcttctgaaataaagactgactacctatcaattataatggacccagatgaagttcctttggatgagcagtgtgagcggctcccttatgatgccagcaagtgggagtttgcccgggagagacttaaactgggcaaatcacttggaagaggggcttttggaaaagtggttcaagcatcagcatttggcattaagaaatcacctacgtgccggactgtggctgtgaaaatgctgaaagagggggccacggccagcgagtacaaagctctgatgactgagctaaaaatcttgacccacattggccaccatctgaacgtggttaacctgctgggagcctgcaccaagcaaggagggcctctgatggtgattgttgaatactgcaaatatggaaatctctccaactacctcaagagcaaacgtgacttattttttctcaacaaggatgcagcactacacatggagcctaagaaagaaaaaatggagccaggcctggaacaaggcaagaaaccaagactagatagcgtcaccagcagcgaaagctttgcgagctccggctttcaggaagataaaagtctgagtgatgttgaggaagaggaggattctgacggtttctacaaggagcccatcactatggaagatctgatttcttacagttttcaagtggccagaggcatggagttcctgtcttccagaaagtgcattcatcgggacctggcagcgagaaacattcttttatctgagaacaacgtggtgaagatttgtgattttggccttgcccgggatatttataagaaccccgattatgtgagaaaaggagatactcgacttcctctgaaatggatggctcccgaatctatctttgacaaaatctacagcaccaagagcgacgtgtggtcttacggagtattgctgtgggaaatcttctccttaggtgggtctccatacccaggagtacaaatggatgaggacttttgcagtcgcctgagggaaggcatgaggatgagagctcctgagtactctactcctgaaatctatcagatcatgctggactgctggcacagagacccaaaagaaaggccaagatttgcagaacttgtggaaaaactaggtgatttgcttcaagcaaatgtacaacaggatggtaaagactacatcccaatcaatgccatactgacaggaaatagtgggtttacatactcaactcctgccttctctgaggacttcttcaaggaaagtatttcagctccgaagtttaattcaggaagctctgatgatgtcagatatgtaaatgctttcaagttcatgagcctggaaagaatcaaaacctttgaagaacttttaccgaatgccacctccatgtttgatgactaccagggcgacagcagcactctgttggcctctcccatgctgaagcgcttcacctggactgacagcaaacccaaggcctcgctcaagattgacttgagagtaaccagtaaaagtaaggagtcggggctgtctgatgtcagcaggcccagtttctgccattccagctgtgggcacgtcagcgaaggcaagcgcaggttcacctacgaccacgctgagctggaaaggaaaatcgcgtgctgctccccgcccccagactacaactcggtggtcctgtactccaccccacccatctagagtttgacacgaagccttatttctagaagcacatgtgtatttatacccccaggaaactagcttttgccagtattatgcatatataagtttacacctttatctttccatgggagccagctgctttttgtgatttttttaatagtgctttttttttttgactaacaagaatgtaactccagatagagaaatagtgacaagtgaagaacactactgctaaatcctcatgttactcagtgttagagaaatccttcctaaacccaatgacttccctgctccaacccccgccacctcagggcacgcaggaccagtttgattgaggagctgcactgatcacccaatgcatcacgtaccccactgggccagccctgcagcccaaaacccagggcaacaagcccgttagccccaggggatcactggctggcctgagcaacatctcgggagtcctctagcaggcctaagacatgtgaggaggaaaaggaaaaaaagcaaaaagcaagggagaaaagagaaaccgggagaaggcatgagaaagaatttgagacgcaccatgtgggcacggagggggacggggctcagcaatgccatttcagtggcttcccagctctgacccttctacatttgagggcccagccaggagcagatggacagcgatgaggggacattttctggattctgggaggcaagaaaaggacaaatatcttttttggaactaaagcaaattttagacctttacctatggaagtggttctatgtccattctcattcgtggcatgttttgatttgtagcactgagggtggcactcaactctgagcccatacttttggctcctctagtaagatgcactgaaaacttagccagagttaggttgtctccaggccatgatggccttacactgaaaatgtcacattctattttgggtattaatatatagtccagacacttaactcaatttcttggtattattctgttttgcacagttagttgtgaaagaaagctgagaagaatgaaaatgcagtcctgaggagagttttctccatatcaaaacgagggctgatggaggaaaaaggtcaataaggtcaagggaagaccccgtctctataccaaccaaaccaattcaccaacacagttgggacccaaaacacaggaagtcagtcacgtttccttttcatttaatggggattccactatctcacactaatctgaaaggatgtggaagagcattagctggcgcatattaagcactttaagctccttgagtaaaaaggtggtatgtaatttatgcaaggtatttctccagttgggactcaggatattagttaatgagccatcactagaagaaaagcccattttcaactgctttgaaacttgcctggggtctgagcatgatgggaatagggagacagggtaggaaagggcgcctactcttcagggtctaaagatcaagtgggccttggatcgctaagctggctctgtttgatgctatttatgcaagttagggtctatgtattta

SEQ ID NO: 390 - DNA, 5830 bp, Homo sapiens
  ref <308>: DATABASE ACCESSION NUMBER: GenBank No. NM002253
  ref <309>: DATABASE ENTRY DATE: 2004-10-26
actgagtcccgggaccccgggagagcggtcagtgtgtggtcgctgcgtttcctctgcctgcgccgggcatcacttgcgcgccgcagaaagtccgtctggcagcctggatatcctctcctaccggcacccgcagacgcccctgcagccgccggtcggcgcccgggctccctagccctgtgcgctcaactgtcctgcgctgcggggtgccgcgagttccacctccgcgcctccttctctagacaggcgctgggagaaagaaccggctcccgagttctgggcatttcgcccggctcgaggtgcaggatgcagagcaaggtgctgctggccgtcgccctgtggctctgcgtggagacccgggccgcctctgtgggtttgcctagtgtttctcttgatctgcccaggctcagcatacaaaaagacatacttacaattaaggctaatacaactcttcaaattacttgcaggggacagagggacttggactggctttggcccaataatcagagtggcagtgagcaaagggtggaggtgactgagtgcagcgatggcctcttctgtaagacactcacaattccaaaagtgatcggaaatgacactggagcctacaagtgcttctaccgggaaactgacttggcctcggtcatttatgtctatgttcaagattacagatctccatttattgcttctgttagtgaccaacatggagtcgtgtacattactgagaacaaaaacaaaactgtggtgattccatgtctcgggtccatttcaaatctcaacgtgtcactttgtgcaagatacccagaaaagagatttgttcctgatggtaacagaatttcctgggacagcaagaagggctttactattcccagctacatgatcagctatgctggcatggtcttctgtgaagcaaaaattaatgatgaaagttaccagtctattatgtacatagttgtcgttgtagggtataggatttatgatgtggttctgagtccgtctcatggaattgaactatctgttggagaaaagcttgtcttaaattgtacagcaagaactgaactaaatgtggggattgacttcaactgggaatacccttcttcgaagcatcagcataagaaacttgtaaaccgagacctaaaaacccagtctgggagtgagatgaagaaatttttgagcaccttaactatagatggtgtaacccggagtgaccaaggattgtacacctgtgcagcatccagtgggctgatgaccaagaagaacagcacatttgtcagggtccatgaaaaaccttttgttgcttttggaagtggcatggaatctctggtggaagccacggtgggggagcgtgtcagaatccctgcgaagtaccttggttacccacccccagaaataaaatggtataaaaatggaataccccttgagtccaatcacacaattaaagcggggcatgtactgacgattatggaagtgagtgaaagagacacaggaaattacactgtcatccttaccaatcccatttcaaaggagaagcagagccatgtggtctctctggttgtgtatgtcccaccccagattggtgagaaatctctaatctctcctgtggattcctaccagtacggcaccactcaaacgctgacatgtacggtctatgccattcctcccccgcatcacatccactggtattggcagttggaggaagagtgcgccaacgagcccagccaagctgtctcagtgacaaacccatacccttgtgaagaatggagaagtgtggaggacttccagggaggaaataaaattgaagttaataaaaatcaatttgctctaattgaaggaaaaaacaaaactgtaagtacccttgttatccaagcggcaaatgtgtcagctttgtacaaatgtgaagcggtcaacaaagtcgggagaggagagagggtgatctccttccacgtgaccaggggtcctgaaattactttgcaacctgacatgcagcccactgagcaggagagcgtgtctttgtggtgcactgcagacagatctacgtttgagaacctcacatggtacaagcttggcccacagcctctgccaatccatgtgggagagttgcccacacctgtttgcaagaacttggatactctttggaaattgaatgccaccatgttctctaatagcacaaatgacattttgatcatggagcttaagaatgcatccttgcaggaccaaggagactatgtctgccttgctcaagacaggaagaccaagaaaagacattgcgtggtcaggcagctcacagtcctagagcgtgtggcacccacgatcacaggaaacctggagaatcagacgacaagtattggggaaagcatcgaagtctcatgcacggcatctgggaatccccctccacagatcatgtggtttaaagataatgagacccttgtagaagactcaggcattgtattgaaggatgggaaccggaacctcactatccgcagagtgaggaaggaggacgaaggcctctacacctgccaggcatgcagtgttcttggctgtgcaaaagtggaggcatttttcataatagaaggtgcccaggaaaagacgaacttggaaatcattattctagtaggcacggcggtgattgccatgttcttctggctacttcttgtcatcatcctacggaccgttaagcgggccaatggaggggaactgaagacaggctacttgtccatcgtcatggatccagatgaactcccattggatgaacattgtgaacgactgccttatgatgccagcaaatgggaattccccagagaccggctgaagctaggtaagcctcttggccgtggtgcctttggccaagtgattgaagcagatgcctttggaattgacaagacagcaacttgcaggacagtagcagtcaaaatgttgaaagaaggagcaacacacagtgagcatcgagctctcatgtctgaactcaagatcctcattcatattggtcaccatctcaatgtggtcaaccttctaggtgcctgtaccaagccaggagggccactcatggtgattgtggaattctgcaaatttggaaacctgtccacttacctgaggagcaagagaaatgaatttgtcccctacaagaccaaaggggcacgattccgtcaagggaaagactacgttggagcaatccctgtggatctgaaacggcgcttggacagcatcaccagtagccagagctcagccagctctggatttgtggaggagaagtccctcagtgatgtagaagaagaggaagctcctgaagatctgtataaggacttcctgaccttggagcatctcatctgttacagcttccaagtggctaagggcatggagttcttggcatcgcgaaagtgtatccacagggacctggcggcacgaaatatcctcttatcggagaagaacgtggttaaaatctgtgactttggcttggcccgggatatttataaagatccagattatgtcagaaaaggagatgctcgcctccctttgaaatggatggccccagaaacaatttttgacagagtgtacacaatccagagtgacgtctggtcttttggtgttttgctgtgggaaatattttccttaggtgcttctccatatcctggggtaaagattgatgaagaattttgtaggcgattgaaagaaggaactagaatgagggcccctgattatactacaccagaaatgtaccagaccatgctggactgctggcacggggagcccagtcagagacccacgttttcagagttggtggaacatttgggaaatctcttgcaagctaatgctcagcaggatggcaaagactacattgttcttccgatatcagagactttgagcatggaagaggattctggactctctctgcctacctcacctgtttcctgtatggaggaggaggaagtatgtgaccccaaattccattatgacaacacagcaggaatcagtcagtatctgcagaacagtaagcgaaagagccggcctgtgagtgtaaaaacatttgaagatatcccgttagaagaaccagaagtaaaagtaatcccagatgacaaccagacggacagtggtatggttcttgcctcagaagagctgaaaactttggaagacagaaccaaattatctccatcttttggtggaatggtgcccagcaaaagcagggagtctgtggcatctgaaggctcaaaccagacaagcggctaccagtccggatatcactccgatgacacagacaccaccgtgtactccagtgaggaagcagaacttttaaagctgatagagattggagtgcaaaccggtagcacagcccagattctccagcctgactcggggaccacactgagctctcctcctgtttaaaaggaagcatccacaccccaactcccggacatcacatgagaggtctgctcagattttgaagtgttgttctttccaccagcaggaagtagccgcatttgattttcatttcgacaacagaaaaaggacctcggactgcagggagccagtcttctaggcatatcctggaagaggcttgtgacccaagaatgtgtctgtgtcttctcccagtgttgacctgatcctcttttttcattcatttaaaaagcattatcatgcccctgctgcgggtctcaccatgggtttagaacaaagagcttcaagcaatggccccatcctcaaagaagtagcagtacctggggagctgacacttctgtaaaactagaagataaaccaggcaacgtaagtgttcgaggtgttgaagatgggaaggatttgcagggctgagtctatccaagaggctttgtttaggacgtgggtcccaagccaagccttaagtgtggaattcggattgatagaaaggaagactaacgttaccttgctttggagagtactggagcctgcaaatgcattgtgtttgctctggtggaggtgggcatggggtctgttctgaaatgtaaagggttcagacggggtttctggttttagaaggttgcgtgttcttcgagttgggctaaagtagagttcgttgtgctgtttctgactcctaatgagagttccttccagaccgttagctgtctccttgccaagccccaggaagaaaatgatgcagctctggctccttgtctcccaggctgatcctttattcagaataccacaaagaaaggacattcagctcaaggctccctgccgtgttgaagagttctgactgcacaaaccagcttctggtttcttctggaatgaataccctcatatctgtcctgatgtgatatgtctgagactgaatgcgggaggttcaatgtgaagctgtgtgtggtgtcaaagtttcaggaaggattttacccttttgttcttccccctgtccccaacccactctcaccccgcaacccatcagtattttagttatttggcctctactccagtaaacctgattgggtttgttcactctctgaatgattattagccagacttcaaaattattttatagcccaaattataacatctattgtattatttagacttttaacatatagagctatttctactgatttttgcccttgttctgtcctttttttcaaaaaagaaaatgtgttttttgtttggtaccatagtgtgaaatgctgggaacaatgactataagacatgctatggcacatatatttatagtctgtttatgtagaaacaaatgtaatatattaaagccttatatataatgaactttgtactattcacattttgtatcagtattatgtagcataacaaaggtcataatgctttcagcaattgatgtcattttattaaagaacattgaaaaacttga

SEQ ID NO: 391 - DNA, 4450 bp, Homo Sapiens
  ref <308>: DATABASE ACCESSION NUMBER: GenBank No. NM002020
  ref <309>: DATABASE ENTRY DATE: 2004-12-18
acccacgcgcagcggccggagatgcagcggggcgccgcgctgtgcctgcgactgtggctctgcctgggactcctggacggcctggtgagtgactactccatgacccccccgaccttgaacatcacggaggagtcacacgtcatcgacaccggtgacagcctgtccatctcctgcaggggacagcaccccctcgagtgggcttggccaggagctcaggaggcgccagccaccggagacaaggacagcgaggacacgggggtggtgcgagactgcgagggcacagacgccaggccctactgcaaggtgttgctgctgcacgaggtacatgccaacgacacaggcagctacgtctgctactacaagtacatcaaggcacgcatcgagggcaccacggccgccagctcctacgtgttcgtgagagactttgagcagccattcatcaacaagcctgacacgctcttggtcaacaggaaggacgccatgtgggtgccctgtctggtgtccatccccggcctcaatgtcacgctgcgctcgcaaagctcggtgctgtggccagacgggcaggaggtggtgtgggatgaccggcggggcatgctcgtgtccacgccactgctgcacgatgccctgtacctgcagtgcgagaccacctggggagaccaggacttcctttccaaccccttcctggtgcacatcacaggcaacgagctctatgacatccagctgttgcccaggaagtcgctggagctgctggtaggggagaagctggtcctcaactgcaccgtgtgggctgagtttaactcaggtgtcacctttgactgggactacccagggaagcaggcagagcggggtaagtgggtgcccgagcgacgctcccaacagacccacacagaactctccagcatcctgaccatccacaacgtcagccagcacgacctgggctcgtatgtgtgcaaggccaacaacggcatccagcgatttcgggagagcaccgaggtcattgtgcatgaaaatcccttcatcagcgtcgagtggctcaaaggacccatcctggaggccacggcaggagacgagctggtgaagctgcccgtgaagctggcagcgtaccccccgcccgagttccagtggtacaaggatggaaaggcactgtccgggcgccacagtccacatgccctggtgctcaaggaggtgacagaggccagcacaggcacctacaccctcgccctgtggaactccgctgctggcctgaggcgcaacatcagcctggagctggtggtgaatgtgcccccccagatacatgagaaggaggcctcctcccccagcatctactcgcgtcacagccgccaggccctcacctgcacggcctacggggtgcccctgcctctcagcatccagtggcactggcggccctggacaccctgcaagatgtttgcccagcgtagtctccggcggcggcagcagcaagacctcatgccacagtgccgtgactggagggcggtgaccacgcaggatgccgtgaaccccatcgagagcctggacacctggaccgagtttgtggagggaaagaataagactgtgagcaagctggtgatccagaatgccaacgtgtctgccatgtacaagtgtgtggtctccaacaaggtgggccaggatgagcggctcatctacttctatgtgaccaccatccccgacggcttcaccatcgaatccaagccatccgaggagctactagagggccagccggtgctcctgagctgccaagccgacagctacaagtacgagcatctgcgctggtaccgcctcaacctgtccacgctgcacgatgcgcacgggaacccgcttctgctcgactgcaagaacgtgcatctgttcgccacccctctggccgccagcctggaggaggtggcacctggggcgcgccacgccacgctcagcctgagtatcccccgcgtcgcgcccgagcacgagggccactatgtgtgcgaagtgcaagaccggcgcagccatgacaagcactgccacaagaagtacctgtcggtgcaggccctggaagcccctcggctcacgcagaacttgaccgacctcctggtgaacgtgagcgactcgctggagatgcagtgcttggtggccggagcgcacgcgcccagcatcgtgtggtacaaagacgagaggctgctggaggaaaagtctggagtcgacttggcggactccaaccagaagctgagcatccagcgcgtgcgcgaggaggatgcgggaccgtatctgtgcagcgtgtgcagacccaagggctgcgtcaactcctccgccagcgtggccgtggaaggctccgaggataagggcagcatggagatcgtgatccttgtcggtaccggcgtcatcgctgtcttcttctgggtcctcctcctcctcatcttctgtaacatgaggaggccggcccacgcagacatcaagacgggctacctgtccatcatcatggaccccggggaggtgcctctggaggagcaatgcgaatacctgtcctacgatgccagccagtgggaattcccccgagagcggctgcacctggggagagtgctcggctacggcgccttcgggaaggtggtggaagcctccgctttcggcatccacaagggcagcagctgtgacaccgtggccgtgaaaatgctgaaagagggcgccacggccagcgagcagcgcgcgctgatgtcggagctcaagatcctcattcacatcggcaaccacctcaacgtggtcaacctcctcggggcgtgcaccaagccgcagggccccctcatggtgatcgtggagttctgcaagtacggcaacctctccaacttcctgcgcgccaagcgggacgccttcagcccctgcgcggagaagtctcccgagcagcgcggacgcttccgcgccatggtggagctcgccaggctggatcggaggcggccggggagcagcgacagggtcctcttcgcgcggttctcgaagaccgagggcggagcgaggcgggcttctccagaccaagaagctgaggacctgtggctgagcccgctgaccatggaagatcttgtctgctacagcttccaggtggccagagggatggagttcctggcttcccgaaagtgcatccacagagacctggctgctcggaacattctgctgtcggaaagcgacgtggtgaagatctgtgactttggccttgcccgggacatctacaaagaccccgactacgtccgcaagggcagtgcccggctgcccctgaagtggatggcccctgaaagcatcttcgacaaggtgtacaccacgcagagtgacgtgtggtcctttggggtgcttctctgggagatcttctctctgggggcctccccgtaccctggggtgcagatcaatgaggagttctgccagcgcgtgagagacggcacaaggatgagggccccggagctggccactcccgccatacgccacatcatgctgaactgctggtccggagaccccaaggcgagacctgcattctcggacctggtggagatcctgggggacctgctccagggcaggggcctgcaagaggaagaggaggtctgcatggccccgcgcagctctcagagctcagaagagggcagcttctcgcaggtgtccaccatggccctacacatcgcccaggctgacgctgaggacagcccgccaagcctgcagcgccacagcctggccgccaggtattacaactgggtgtcctttcccgggtgcctggccagaggggctgagacccgtggttcctccaggatgaagacatttgaggaattccccatgaccccaacgacctacaaaggctctgtggacaaccagacagacagtgggatggtgctggcctcggaggagtttgagcagatagagagcaggcatagacaagaaagcggcttcaggtagctgaagcagagagagagaaggcagcatacgtcagcattttcttctctgcacttataagaaagatcaaagactttaagactttcgctatttcttctactgctatctactacaaacttcaaagaggaaccaggaggacaagaggagcatgaaagtggacaaggagtgtgaccactgaagcaccacagggaggggttaggcctccggatgactgcgggcaggcctggataatatccagcctcccacaagaagctggtggagcagagtgttccctgactcctccaaggaaagggagacgccctttcatggtctgctgagtaacaggtgccttcccagacactggcgttactgcttgaccaaagagccctcaagcggcccttatgccagcgtgacagagggctcacctcttgccttctaggtcacttctcacaatgtcccttcagcacctgaccctgtgcccgccgattattccttggtaatatgagtaatacatcaaagagtagtattaaaagctaattaatcatgtttataaaaa

SEQ ID NO: 392 - protein, 913 aa, Homo sapiens
  ref <308>: DATABASE ACCESSION NUMBER: GenBank No. NP054699
  ref <309>: DATABASE ENTRY DATE: 2004-10-26
MGPEALSSLLLLLLVASGDADMKGHFDPAKCRYALGMQDRTIPDSDISASSSWSDSTAARHSRLESSDGDGAWCPAGSVFPKEEEYLQVDLQRLHLVALVGTQGRHAGGLGKEFSRSYRLRYSRDGRRWMGWKDRWGQEVISGNEDPEGVVLKDLGPPMVARLVRFYPRADRVMSVCLRVELYGCLWRDGLLSYTAPVGQTMYLSEAVYLNDSTYDGHTVGGLQYGGLGQLADGVVGLDDFRKSQELRVWPGYDYVGWSNHSFSSGYVEMEFEFDRLRAFQAMQVHCNNMHTLGARLPGGVECRFRRGPAMAWEGEPMRHNLGGNLGDPRARAVSVPLGGRVARFLQCRFLFAGPWLLFSEISFISDVVNNSSPALGGTFPPAPWWPPGPPPTNFSSLELEPRGQQPVAKAEGSPTAILIGCLVAIILLLLLIIALMLWRLHWRRLLSKAERRVLEEELTVHLSVPGDTILINNRPGPREPPPYQEPRPRGNPPHSAPCVPNGSALLLSNPAYRLLLATYARPPRGPGPPTPAWAKPTNTQAYSGDYMEPEKPGAPLLPPPPQNSVPHYAEADIVTLQGVTGGNTYAVPALPPGAVGDGPPRVDFPRSRLRFKEKLGEGQFGEVHLCEVDSPQDLVSLDFPLNVRKGHPLLVAVKILRPDATKNARNDFLKEVKIMSRLKDPNIIRLLGVCVQDDPLCMITDYMENGDLNQFLSAHQLEDKAAEGAPGDGQAAQGPTISYPMLLHVAAQIASGMRYLATLNFVHRDLATRNCLVGENFTIKIADFGMSRNLYAGDYYRVQGRAVLPIRWMAWECILMGKFTTASDVWAFGVTLWEVLMLCRAQPFGSAHRRAGHRERGGVLPGPGPAVYLSRPPACPQGLYELMLRCWSRESEQRPPFSQLHRFLAEDALNTV

SEQ ID NO: 393 - protein, 855 aa, Homo sapiens
  ref <308>: DATABASE ACCESSION NUMBER: GenBank No. NP006173
  ref <309>: DATABASE ENTRY DATE: 2004-10-26
MILIPRMLLVLFLLLPILSSAKAQVNPAICRYPLGMSGGQIPDEDITASSQWSESTAAKYGRLDSEEGDGAWCPEIPVEPDDLKEFLQIDLHTLHFITLVGTQGRHAGGHGIEFAPMYKINYSRDGTRWISWRNRHGKQVLDGNSNPYDIFLKDLEPPIVARFVRFIPVTDHSMNVCMRVELYGCVWLDGLVSYNAPAGQQFVLPGGSIIYLNDSVYDGAVGYSMTEGLGQLTDGVSGLDDFTQTHEYHVWPGYDYVGWRNESATNGYIEIMFEFDRIRNFTTMKVHCNNMFAKGVKIFKEVQCYFRSEASEWEPNAISFPLVLDDVNPSARFVTVPLHHRMASAIKCQYHFADTWMMFSEITFQSDAAMYNNSEALPTSPMAPTTYDPMLKVDDSNTRILIGCLVAIIFILLAIIVIILWRQFWQKMLEKASRRMLDDEMTVSLSLPSDSSMFNNNRSSSPSEQGSNSTYDRIFPLRPDYQEPSRLIRKLPEFAPGEEESGCSGVVKPVQPSGPEGVPHYAEADIVNLQGVTGGNTYSVPAVTMDLLSGKDVAVEEFPRKLLTFKEKLGEGQFGEVHLCEVEGMEKFKDKDFALDVSANQPVLVAVKMLRADANKNARNDFLKEIKIMSRLKDPNIIHLLSVCITDDPLCMITEYMENGDLNQFLSRHEPPNSSSSDVRTVSYTNLKFMATQIASGMKYLSSLNFVHRDLATRNCLVGKNYTIKIADFGMSRNLYSGDYYRIQGRAVLPIRWMSWESILLGKFTTASDVWAFGVTLWETFTFCQEQPYSQLSDEQVIENTGEFFRDQGRQTYLPQPAICPDSVYKLMLSCWRRDTKNRPSFQEIHLLLLQQGDE

SEQ ID NO: 394 - protein, 976 aa, Homo sapiens
  ref <308>: DATABASE ACCESSION NUMBER: GenBank No. NP005223
  ref <309>: DATABASE ENTRY DATE: 2004-11-29
MERRWPLGLGLVLLLCAPLPPGARAKEVTLMDTSKAQGELGWLLDPPKDGWSEQQQILNGTPLYMYQDCPMQGRRDTDHWLRSNWIYRGEEASRVHVELQFTVRDCKSFPGGAGPLGCKETFNLLYMESDQDVGIQLRRPLFQKVTTVAADQSFTIRDLASGSVKLNVERCSLGRLTRRGLYLAFHNPGACVALVSVRVFYQRCPETLNGLAQFPDTLPGPAGLVEVAGTCLPHARASPRPSGAPRMHCSPDGEWLVPVGRCHCEPGYEEGGSGEACVACPSGSYRMDMDTPHCLTCPQQSTAESEGATICTCESGHYRAPGEGPQVACTGPPSAPRNLSFSASGTQLSLRWEPPADTGGRQDVRYSVRCSQCQGTAQDGGPCQPCGVGVHFSPGARGLTTPAVHVNGLEPYANYTFNVEAQNGVSGLGSSGHASTSVSISMGHAESLSGLSLRLVKKEPRQLELTWAGSRPRSPGANLTYELHVLNQDEERYQMVLEPRVLLTELQPDTTYIVRVRMLTPLGPGPFSPDHEFRTSPPVSRGLTGGEIVAVIFGLLLGAALLLGILVFRSRRAQRQRQQRQRDRATDVDREDKLWLKPYVDLQAYEDPAQGALDFTRELDPAWLMVDTVIGEGEFGEVYRGTLRLPSQDCKTVAIKTLKDTSPGGQWWNFLREATIMGQFSHPHILHLEGVVTKRKPIMIITEFMENGALDAFLREREDQLVPGQLVAMLQGIASGMNYLSNHNYVHRDLAARNILVNQNLCCKVSDFGLTRLLDDFDGTYETQGGKIPIRWTAPEAIAHRIFTTASDVWSFGIVMWEVLSFGDKPYGEMSNQEVMKSIEDGYRLPPPVDCPAPLYELMKNCWAYDRARRPHFQKLQAHLEQLLANPHSLRTIANFDPRMTLRLPSLSGSDGIPYRTVSEWLESIRMKRYILHFHSAGLDTMECVLELTAEDLTQMGITLPGHQKRILCSIQGFKD

SEQ ID NO: 395 - protein, 976 aa, Homo sapiens
  ref <308>: DATABASE ACCESSION NUMBER: GenBank No. NP004422
  ref <309>: DATABASE ENTRY DATE: 2004-12-20
MELQAARACFALLWGCALAAAAAAQGKEVVLLDFAAAGGELGWLTHPYGKGWDLMQNIMNDMPIYMYSVCNVMSGDQDNWLRTNWVYRGEAERIFIELKFTVRDCNSFPGGASSCKETFNLYYAESDLDYGTNFQKRLFTKIDTIAPDEITVSSDFEARHVKLNVEERSVGPLTRKGFYLAFQDIGACVALLSVRVYYKKCPELLQGLAHFPETIAGSDAPSLATVAGTCVDHAVVPPGGEEPRMHCAVDGEWLVPIGQCLCQAGYEKVEDACQACSPGFFKFEASESPCLECPEHTLPSPEGATSCECEEGFFRAPQDPASMPCTRPPSAPHYLTAVGMGAKVELRWTPPQDSGGREDIVYSVTCEQCWPESGECGPCEASVRYSEPPHGLTRTSVTVSDLEPHMNYTFTVEARNGVSGLVTSRSFRTASVSINQTEPPKVRLEGRSTTSLSVSWSIPPPQQSRVWKYEVTYRKKGDSNSYNVRRTEGFSVTLDDLAPDTTYLVQVQALTQEGQGAGSKVHEFQTLSPEGSGNLAVIGGVAVGVVLLLVLAGVGFFIHRRRKNQRARQSPEDVYFSKSEQLKPLKTYVDPHTYEDPNQAVLKFTTEIHPSCVTRQKVIGAGEFGEVYKGMLKTSSGKKEVPVAIKTLKAGYTEKQRVDFLGEAGIMGQFSHHNIIRLEGVISKYKPMMIITEYMENGALDKFLREKDGEFSVLQLVGMLRGIAAGMKYLANMNYVHRDLAARNILVNSNLVCKVSDFGLSRVLEDDPEATYTTSGGKIPIRWTAPEAISYRKFTSASDVWSFGIVMWEVMTYGERPYWELSNHEVMKAINDGFRLPTPMDCPSAIYQLMMQCWQQERARRPKFADIVSILDKLIRAPDSLKTLADFDPRVSIRLPSTSGSEGVPFRTVSEWLESIKMQQYTEHFMAAGYTAIEKVVQMTNDDIKRIGVRLPGHQKRIAYSLLGLKDQVNTVGIPI

SEQ ID NO: 396 - protein, 983 aa, Homo sapiens
  ref <308>: DATABASE ACCESSION NUMBER: GenBank No. NP005224
  ref <309>: DATABASE ENTRY DATE: 2004-11-16
MDCQLSILLLLSCSVLDSFGELIPQPSNEVNLLDSKTIQGELGWISYPSHGWEEISGVDEHYTPIRTYQVCNVMDHSQNNWLRTNWVPRNSAQKIYVELKFTLRDCNSIPLVLGTCKETFNLYYMESDDDHGVKFREHQFTKIDTIAADESFTQMDLGDRILKLNTEIREVGPVNKKGFYLAFQDVGACVALVSVRVYFKKCPFTVKNLAMFPDTVPMDSQSLVEVRGSCVNNSKEEDPPRMYCSTEGEWLVPIGKCSCNAGYEERGFMCQACRPGFYKALDGNMKCAKCPPHSSTQEDGSMNCRCENNYFRADKDPPSMACTRPPSSPRNVISNINETSVILDWSWPLDTGGRKDVTFNIICKKCGWNIKQCEPCSPNVRFLPRQFGLTNTTVTVTDLLAHTNYTFEIDAVNGVSELSSPPRQFAAVSITTNQAAPSPVLTIKKDRTSRNSISLSWQEPEHPNGIILDYEVKYYEKQEQETSYTILRARGTNVTISSLKPDTIYVFQIRARTAAGYGTNSRKFEFETSPDSFSISGESSQVVMIAISAAVAIILLTVVIYVLIGRFCGYKSKHGADEKRLHFGNGHLKLPGLRTYVDPHTYEDPTQAVHEFAKELDATNISIDKVVGAGEFGEVCSGRLKLPSKKEISVAIKTLKVGYTEKQRRDFLGEASIMGQFDHPNIIRLEGVVTKSKPVMIVTEYMENGSLDSFLRKHDAQFTVIQLVGMLRGIASGMKYLSDMGYVHRDLAARNILINSNLVCKVSDFGLSRVLEDDPEAAYTTRGGKIPIRWTSPEAIAYRKFTSASDVWSYGIVLWEVMSYGERPYWEMSNQDVIKAVDEGYRLPPPMDCPAALYQLMLDCWQKDRNNRPKFEQIVSILDKLIRNPGSLKIITSAAARPSNLLLDQSNVDITTFRTTGDWLNGVWTAHCKEIFTGVEYSSCDTIAKISTDDMKKVGVTVVGPQKKIISSIKALETQSKNGPVPV

SEQ ID NO: 397 - protein, 986 aa, Homo sapiens
  ref <308>: DATABASE ACCESSION NUMBER: GenBank No. NP004429
  ref <309>: DATABASE ENTRY DATE: 2004-11-16
MAGIFYFALFSCLFGICDAVTGSRVYPANEVTLLDSRSVQGELGWIASPLEGGWEEVSIMDEKNTPIRTYQVCNVMEPSQNNWLRTDWITREGAQRVYIEIKFTLRDCNSLPGVMGTCKETFNLYYYESDNDKERFIRENQFVKIDTIAADESFTQVDIGDRIMKLNTEIRDVGPLSKKGFYLAFQDVGACIALVSVRVFYKKCPLTVRNLAQFPDTITGADTSSLVEVRGSCVNNSEEKDVPKMYCGADGEWLVPIGNCLCNAGHEERSGECQACKIGYYKALSTDATCAKCPPHSYSVWEGATSCTCDRGFFRADNDAASMPCTRPPSAPLNLISNVNETSVNLEWSSPQNTGGRQDISYNVVCKKCGAGDPSKCRPCGSGVHYTPQQNGLKTTKVSITDLLAHTNYTFEIWAVNGVSKYNPNPDQSVSVTVTTNQAAPSSIALVQAKEVTRYSVALAWLEPDRPNGVILEYEVKYYEKDQNERSYRIVRTAARNTDIKGLNPLTSYVFHVRARTAAGYGDFSEPLEVTTNTVPSRIIGDGANSTVLLVSVSGSVVLVVILIAAFVISRRRSKYSKAKQEADEEKHLNQGVRTYVDPFTYEDPNQAVREFAKEIDASCIKIEKVIGVGEFGEVCSGRLKVPGKREICVAIKTLKAGYTDKQRRDFLSEASIMGQFDHPNIIHLEGVVTKCKPVMIITEYMENGSLDAFLRKNDGRFTVIQLVGMLRGIGSGMKYLSDMSYVHRDLAARNILVNSNLVCKVSDFGMSRVLEDDPEAAYTTRGGKIPIRWTAPEAIAYRKFTSASDVWSYGIVMWEVMSYGERPYWDMSNQDVIKAIEEGYRLPPPMDCPIALHQLMLDCWQKERSDRPKFGQIVNMLDKLIRNPNSLKRTGTESSRPNTALLDPSSPEFSAVVSVGDWLQAIKMDRYKDNFTAAGYTTLEAVVHVNQEDLARIGITAITHQNKILSSVQAMRTQMQQMHGRMVPV

SEQ ID NO: 398 - protein, 991 aa, Homo sapiens
  ref <308>: DATABASE ACCESSION NUMBER: GenBank No. AAA74245
  ref <309>: DATABASE ENTRY DATE: 1995-08-10
PASLAGCYSAPRRAPLWTCLLLCAALRTLLASPSNEVNLLDSRTVMGDLGWIAFPKNGWEEIGEVDENYAPIHTYQVCKVMEQNQNNWLLTSWISNEGASRIFIELKFTLRDCNSLPGGLGTCKETFNMYYFESDDQNGRNIKENQYIKIDTIAADESFTELDLGDRVMKLNTEVRDVGPLSKKGFYLAFQDVGACIALVSVRVYYKKCPSVVRHLAVFPDTITGADSSQLLEVSGSCVNHSVTDEPPKMHCSAEGEWLVPIGKCMCKAGYEEKNGTCQVCRPGFFKASPHIQSCGKCPPHSYTHEEASTSCVCEKDYFRRESDPPTMACTRPPSAPRNAISNVNETSVFLEWIPPADTGGRKDVSYYIACKKCNSHAGVCEECGGHVRYLPRQSGLKNTSVMMVDLLAHTNYTFEIEAVNGVSDLSPGARQYVSVNVTTNQAAPSPVTNVKKGKIAKNSISLSWQEPDRPNGIILEYEIKHFEKDQETSYTIIKSKETTITAEGLKPASVYVFQIRARTAAGYGVFSRRFEFETTPVFAASSDQSQIPVIAVSVTVGVILLAVVIGVLLSGRRCGYSKAKQDPEEEKMHFHNGHIKLPGVRTYIDPHTYEDPNQAVHEFAKEIEASCITIERVIGAGEFGEVCSGRLKLPGKRELPVAIKTLKVGYTEKQRRDFLGEASIMGQFDHPNIIHLEGVVTKSKPVMIVTEYMENGSLDTFLKKNDGQFTVIQLVGMLRGISAGMKYLSDMGYVHRDLAARNILINSNLVCKVSDFGLSRVLEDDPEAAYTTRGGKIPIRWTAPEAIAFRKFTSASDVWSYGIVMWEVVSYGERPYWEMTNQDVIKAVEEGYRLPSPMDCPAALYQLMLDCWQKERNSRPKFDEIVNMLDKLIRNPSSLKTLVNASCRVSNLLAEHSPLGSGAYRSVGEWLEAIKMGRYTEIFMENGYSSMDAVAQVTLEDLRRLGVTLVGHQKKIMNSLQEMKVQLVNGMVPL

SEQ ID NO: 399 - protein, 334 aa, Homo sapiens
  ref <308>: DATABASE ACCESSION NUMBER: GenBank No. CAB63775
  ref <309>: DATABASE ENTRY DATE: 2005-01-20
MKDSPFQVTKLYWLNEKWDFIASASDMAAEQGQILVIATAAVGGFTLLVILTLFFLITGRCQWYIKAKMKSEEKRRNHLQNGHLRFPGIKTYIDPDTYEDPSLAVHEFAKEIDPSRIRIERVIGAGEFGEVCSGRLKTPGKREIPVAIKTLKGGHMDRQRRDFLREASIMGQFDHPNIIRLEGVVTKRSFPAIGVEAFCPSFLRAGFLNSIQAPHPVPGGGSLPPRIPAGRPVMIVVEYMENGSLDSFLRKHDGHFTVIQLVGMLRGIASGMKYLSDMGYVHRDLAARNILVNSNLVCKVSDFGLSRVLEDDPEAAYTTTDLFQTLTLNLCYSA

SEQ ID NO: 400 - protein, 998 aa, Homo sapiens
  ref <308>: DATABASE ACCESSION NUMBER: GenBank No. NP004431
  ref <309>: DATABASE ENTRY DATE: 2005-01-26
MVFQTRYPSWIILCYIWLLRFAHTGEAQAAKEVLLLDSKAQQTELEWISSPPNGWEEISGLDENYTPIRTYQVCQVMEPNQNNWLRTNWISKGNAQRIFVELKFTLRDCNSLPGVLGTCKETFNLYYYETDYDTGRNIRENLYVKIDTIAADESFTQGDLGERKMKLNTEVREIGPLSKKGFYLAFQDVGACIALVSVKVYYKKCWSIIENLAIFPDTVTGSEFSSLVEVRGTCVSSAEEEAENAPRMHCSAEGEWLVPIGKCICKAGYQQKGDTCEPCGRGFYKSSSQDLQCSRCPTHSFSDKEGSSRCECEDGYYRAPSDPPYVACTRPPSAPQNLIFNINQTTVSLEWSPPADNGGRNDVTYRILCKRCSWEQGECVPCGSNIGYMPQQTGLEDNYVTVMDLLAHANYTFEVEAVNGVSDLSRSQRLFAAVSITTGQAAPSQVSGVMKERVLQRSVELSWQEPEHPNGVITEYEIKYYEKDQRERTYSTVKTKSTSASINNLKPGTVYVFQIRAFTAAGYGNYSPRLDVATLEEATGKMFEATAVSSEQNPVIIIAVVAVAGTIILVFMVFGFIIGRRHCGYSKADQEGDEELYFHFKFPGTKTYIDPETYEDPNRAVHQFAKELDASCIKIERVIGAGEFGEVCSGRLKLPGKRDVAVAIKTLKVGYTEKQRRDFLCEASIMGQFDHPNVVHLEGVVTRGKPVMIVIEFMENGALDAFLRKHDGQFTVIQLVGMLRGIAAGMRYLADMGYVHRDLAARNILVNSNLVCKVSDFGLSRVIEDDPEAVYTTTGGKIPVRWTAPEAIQYRKFTSASDVWSYGIVMWEVMSYGERPYWDMSNQDVIKAIEEGYRLPAPMDCPAGLHQLMLDCWQKERAERPKFEQIVGILDKMIRNPNSLKTPLGTCSRPISPLLDQNTPDFTTFCSVGEWLQAIKMERYKDNFTAAGYNSLESVARMTIEDVMSLGITLVGHQKKIMSSIQTMRAQMLHLHGTGIQV

SEQ ID NO: 401 - protein, 1005 aa, Homo sapiens
  ref <308>: DATABASE ACCESSION NUMBER: GenBank No. NP065387
  ref <309>: DATABASE ENTRY DATE: 2004-11-16
MAPARGRLPPALWVVTAAAAAATCVSAARGEVNLLDTSTIHGDWGWLTYPAHGWDSINEVDESFQPIHTYQVCNVMSPNQNNWLRTSWVPRDGARRVYAEIKFTLRDCNSMPGVLGTCKETFNLYYLESDRDLGASTQESQFLKIDTIAADESFTGADLGVRRLKLNTEVRSVGPLSKRGFYLAFQDIGACLAILSLRIYYKKCPAMVRNLAAFSEAVTGADSSSLVEVRGQCVRHSEERDTPKMYCSAEGEWLVPIGKCVCSAGYEERRDACVACELGFYKSAPGDQLCARCPPHSHSAAPAAQACHCDLSYYRAALDPPSSACTRPPSAPVNLISSVNGTSVTLEWAPPLDPGGRSDITYNAVCRRCPWALSRCEACGSGTRFVPQQTSLVQASLLVANLLAHMNYSFWIEAVNGVSDLSPEPRRAAVVNITTNQAAPSQVVVIRQERAGQTSVSLLWQEPEQPNGIILEYEIKYYEKDKEMQSYSTLKAVTTRATVSGLKPGTRYVFQVRARTSAGCGRFSQAMEVETGKPRPRYDTRTIVWICLTLITGLVVLLLLLICKKRHCGYSKAFQDSDEEKMHYQNGQAPPPVFLPLHHPPGKLPEPQFYAEPHTYEEPGRAGRSFTREIEASRIHIEKIIGSGDSGEVCYGRLRVPGQRDVPVAIKALKAGYTERQRRDFLSEASIMGQFDHPNIIRLEGVVTRGRLAMIVTEYMENGSLDTFLRTHDGQFTIMQLVGMLRGVGAGMRYLSDLGYVHRDLAARNVLVDSNLVCKVSDFGLSRVLEDDPDAAYTTTGGKIPIRWTAPEAIAFRTFSSASDVWSFGVVMWEVLAYGERPYWNMTNRDVISSVEEGYRLPAPMGCPHALHQLMLDCWHKDRAQRPRFSQIVSVLDALIRSPESLRATATVSRCPPPAFVRSCFDLRGGSGGGGGLTVGDWLDSIRMGRYRDHFAAGGYSSLGMVLRMNAQDVRALGITLMGHQKKILGSIQTMRAQLTSTQGPRRHL

SEQ ID NO: 402 - protein, 984 aa, Homo sapiens
  ref <308>: DATABASE ACCESSION NUMBER: GenBank No. NP004432
  ref <309>: DATABASE ENTRY DATE: 2004-11-15
MALDYLLLLLLASAVAAMEETLMDTRTATAELGWTANPASGWEEVSGYDENLNTIRTYQVCNVFEPNQNNWLLTTFINRRGAHRIYTEMRFTVRDCSSLPNVPGSCKETFNLYYYETDSVIATKKSAFWSEAPYLKVDTIAADESFSQVDFGGRLMKVNTEVRSFGPLTRNGFYLAFQDYGACMSLLSVRVFFKKCPSIVQNFAVFPETMTGAESTSLVIARGTCIPNAEEVDVPIKLYCNGDGEWMVPIGRCTCKPGYEPENSVACKACPAGTFKASQEAEGCSHCPSNSRSPAEASPICTCRTGYYRADFDPPEVACTSVPSGPRNVISIVNETSIILEWHPPRETGGRDDVTYNIICKKCRADRRSCSRCDDNVEFVPRQLGLTECRVSISSLWAHTPYTFDIQAINGVSSKSPFPPQHVSVNITTNQAAPSTVPIMHQVSATMRSITLSWPQPEQPNGIILDYEIRYYEKEHNEFNSSMARSQTNTARIDGLRPGMVYVVQVRARTVAGYGKFSGKMCFQTLTDDDYKSELREQLPLIAGSAAAGVVFVVSLVAISIVCSRKRAYSKEAVYSDKLQHYSTGRGSPGMKIYIDPFTYEDPNEAVREFAKEIDVSFVKIEEVIGAGEFGEVYKGRLKLPGKREIYVAIKTLKAGYSEKQRRDFLSEASIMGQFDHPNIIRLEGVVTKSRPVMIITEFMENGALDSFLRQNDGQFTVIQLVGMLRGIAAGMKYLAEMNYVHRDLAARNILVNSNLVCKVSDFGLSRYLQDDTSDPTYTSSLGGKIPVRWTAPEAIAYRKFTSASDVWSYGIVMWEVMSFGERPYWDMSNQDVINAIEQDYRLPPPMDCPAALHQLMLDCWQKDRNSRPRFAEIVNTLDKMIRNPASLKTVATITAVPSQPLLDRSIPDFTAFTTVDDWLSAIKMVQYRDSFLTAGFTSLQLVTQMTSEDLLRIGITLAGHQKKILNSIHSMRVQISQSPTAMA

SEQ ID NO: 403 - protein, 1055 aa, Homo sapiens
  ref <308>: DATABASE ACCESSION NUMBER: GenBank No. AAB94602
  ref <309>: DATABASE ENTRY DATE: 2000-11-29
MALRRLGAALLLLPLLAAVEETLMDSTTATAELGWMVHPPSGWEEVSGYDENMNTIRTYQVCNVFESSQNNWLRTKFIRRRGAHRIHVEMKFSVRDCSSIPSVPGSCKETFNLYYYEADFDSATKTFPNWMENPWVKVDTIAADESFSQVDLGGRVMKINTEVRSFGPVSRSGFYLAFQDYGGCMSLIAVRVFYRKCPRIIQNGAIFQETLSGAESTSLVAARGSCIANAEEVDVPIKLYCNGDGEWLVPIGRCMCKAGFEAVENGTVCRGCPSGTFKANQGDEACTHCPINSRTTSEGATNCVCRNGYYRADLDPLDMPCTTIPSAPQAVISSVNETSLMLEWTPPRDSGGREDLVYNIICKSCGSGRGACTRCGDNVQYAPRQLGLTEPRIYISDLLAHTQYTFEIQAVNGVTDQSPFSPQFASVNITTNQAAPSAVSIMHQVSRTVDSITLSWSQPDQPNGVILDYELQYYEKELSEYNATAIKSPTNTVTVQGLKAGAIYVFQVRARTVAGYGRYSGKMYFQTMTEAEYQTSIQEKLPLIIGSSAAGLVFLIAVVVIAIVCNRRGFERADSEYTDKLQHYTSGHMTPGMKIYIDPFTYEDPNEAVREFAKEIDISCVKIEQVIGAGEFGEVCSGHLKLPGKREIFVAIKTLKSGYTEKQRRDFLSEASIMGQFDHPNVIHLEGVVTKSTPVMIITEFMENGSLDSFLRQNDGQFTVIQLVGMLRGIAAGMKYLADMNYVHRDLAARNILVNSNLVCKVSDFGLSRFLEDDTSDPTYTSALGGKIPIRWTAPEAIQYRKFTSASDVWSYGIVMWEVMSYGERPYWDMTNQDVINAIEQDYRLPPPMDCPSALHQLMLDCWQKDRNHRPKFGQIVNTLDKMIRNPNSLKAMAPLSSGINLPLLDRTIPDYTSFNTVDEWLEAIKMGQYKESFANAGFTSFDVVSQMMMEDILRVGVTLAGHQKKILNSIQVMRAQMNQIQSVEGQPLARRPRATGRTKRCQPRDVTKKTCNSNDGKKKGMGKKKTDPGRGREIQGIFFKEDSHKESNDCSCGG

SEQ ID NO: 404 - protein, 998 aa, Homo sapiens
  ref <308>: DATABASE ACCESSION NUMBER: GenBank No. NP004434
  ref <309>: DATABASE ENTRY DATE: 2004-11-16
MARARPPPPPSPPPGLLPLLPPLLLLPLLLLPAGCRALEETLMDTKWVTSELAWTSHPESGWEEVSGYDEAMNPIRTYQVCNVRESSQNNWLRTGFIWRRDVQRVYVELKFTVRDCNSIPNIPGSCKETFNLFYYEADSDVASASSPFWMENPYVKVDTIAPDESFSRLDAGRVNTKVRSFGPLSKAGFYLAFQDQGACMSLISVRAFYKKCASTTAGFALFPETLTGAEPTSLVIAPGTCIPNAVEVSVPLKLYCNGDGEWMVPVGACTCATGHEPAAKESQCRPCPPGSYKAKQGEGPCLPCPPNSRTTSPAASICTCHNNFYRADSDSADSACTTVPSPPRGVISNVNETSLILEWSEPRDLGGRDDLLYNVICKKCHGAGGASACSRCDDNVEFVPRQLGLTERRVHISHLLAHTRYTFEVQAVNGVSGKSPLPPRYAAVNITTNQAAPSEVPTLRLHSSSGSSLTLSWAPPERPNGVILDYEMKYFEKSEGIASTVTSQMNSVQLDGLRPDARYVVQVRARTVAGYGQYSRPAEFETTSERGSGAQQLQEQLPLIVGSATAGLVFVVAVVVIAIVCLRKQRHGSDSEYTEKLQQYIAPGMKVYIDPFTYEDPNEAVREFAKEIDVSCVKIEEVIGAGEFGEVCRGRLKQPGRREVFVAIKTLKVGYTERQRRDFLSEASIMGQFDHPNIIRLEGVVTKSRPVMILTEFMENCALDSFLRLNDGQFTVIQLVGMLRGIAAGMKYLSEMNYVHRDLAARNILVNSNLVCKVSDFGLSRFLEDDPSDPTYTSSLGGKIPIRWTAPEAIAYRKFTSASDVWSYGIVMWEVMSYGERPYWDMSNQDVINAVEQDYRLPPPMDCPTALHQLMLDCWVRDRNLRPKFSQIVNTLDKLIRNAASLKVIASAQSGMSQPLLDRTVPDYTTFTTVGDWLDAIKMGRYKESFVSAGFASFDLVAQMTAEDLLRIGVTLAGHQKKILSSIQDMRLQMNQTLPVQV

SEQ ID NO: 405 - protein, 987 aa, Homo sapiens
  ref <308>: DATABASE ACCESSION NUMBER: GenBank No.NP004435
  ref <309>: DATABASE ENTRY DATE: 2004-11-16
MELRVLLCWASLAAALEETLLNTKLETADLKWVTFPQVDGQWEELSGLDEEQHSVRTYEVCDVQRAPGQAHWLRTGWVPRRGAVHVYATLRFTMLECLSLPRAGRSCKETFTVFYYESDADTATALTPAWMENPYIKVDTVAAEHLTRKRPGAEATGKVNVKTLRLGPLSKAGFYLAFQDQGACMALLSLHLFYKKCAQLTVNLTRFPETVPRELVVPVAGSCVVDAVPAPGPSPSLYCREDGQWAEQPVTGCSCAPGFEAAEGNTKCRACAQGTFKPLSGEGSCQPCPANSHSNTIGSAVCQCRVGYFRARTDPRGAPCTTPPSAPRSVVSRLNGSSLHLEWSAPLESGGREDLTYALRCRECRPGGSCAPCGGDLTFDPGPRDLVEPWVVVRGLRPDFTYTFEVTALNGVSSLATGPVPFEPVNVTTDREVPPAVSDIRVTRSSPSSLSLAWAVPRAPSGAVLDYEVKYHEKGAEGPSSVRFLKTSENRAELRGLKRGASYLVQVRARSEAGYGPFGQEHHSQTQLDESEGWREQLALIAGTAVVGVVLVLVVIVVAVLCLRKQSNGREAEYSDKHGQYLIGHGTKVYIDPFTYEDPNEAVREFAKEIDVSYVKIEEVIGAGEFGEVCRGRLKAPGKKESCVAIKTLKGGYTERQRREFLSEASIMGQFEHPNIIRLEGVVTNSMPVMILTEFMENGALDSFLRLNDGQFTVIQLVGMLRGIASGMRYLAEMSYVHRDLAARNILVNSNLVCKVSDFGLSRFLEENSSDPTYTSSLGGKIPIRWTAPEAIAFRKFTSASDAWSYGIVMWEVMSFGERPYWDMSNQDVINAIEQDYRLPPPPDCPTSLHQLMLDCWQKDRNARPRFPQVVSALDKMIRNPASLKIVARENGGASHPLLDQRQPHYSAFGSVGEWLRAIKMGRYEESFAAAGFGSFELVSQISAEDLLRIGVTLAGHQKKILASVQHMKSQAKPGTPGGTGGPAPQY

SEQ ID NO: 406 - protein, 1006 aa, Homo sapiens
  ref <308>: DATABASE ACCESSION NUMBER: GenBank No.NP004436
  ref <309>: DATABASE ENTRY DATE: 2004-11-29
MVCSLWVLLLVSSVLALEEVLLDTTGETSEIGWLTYPPGGWDEVSVLDDQRRLTRTFEACHVAGAPPGTGQDNWLQTHFVERRGAQRAHIRLHFSVRACSSLGVSGGTCRETFTLYYRQAEEPDSPDSVSSWHLKRWTKVDTIAADESFPSSSSSSSSSSSAAWAVGPHGAGQRAGLQLNVKERSFGPLTQRGFYVAFQDTGACLALVAVRLFSYTCPAVLRSFASFPETQASGAGGASLVAAVGTCVAHAEPEEDGVGGQAGGSPPRLHCNGEGKWMVAVGGCRCQPGYQPARGDKACQACPRGLYKSSAGNAPCSPCPARSHAPNPAAPVCPCLEGFYRASSDPPEAPCTGPPSAPQELWFEVQGSALMLHWRLPRELGGRGDLLFNVVCKECEGRQEPASGGGGTCHRCRDEVHFDPRQRGLTESRVLVGGLRAHVPYILEVQAVNGVSELSPDPPQAAAINVSTSHEVPSAVPVVHQVSRASNSITVSWPQPDQTNGNILDYQLRYYDQAEDESHSFTLTSETNTATVTQLSPGHIYGFQVRARTAAGHGPYGGKVYFQTLPQGELSSQLPERLSLVIGSILGALAFLLLAAITVLAVVFQRKRRGTGYTEQLQQYSSPGLGVKYYIDPSTYEDPCQAIRELAREVDPAYIKIEEVIGTGSFGEVRQGRLQPRGRREQTVAIQALWAGGAESLQMTFLGRAAVLGQFQHPNILRLEGVVTKSRPLMVLTEFMELGPLDSFLRQREGQFSSLQLVAMQRGVAAAMQYLSSFAFVHRSLSAHSVLVNSHLVCKVARLGHSPQGPSCLLRWAAPEVIAHGKHTTSSDVWSFGILMWEVMSYGERPYWDMSEQEVLNAIEQEFRLPPPPGCPPGLHLLMLDTWQKDRARRPHFDQLVAAFDKMIRKPDTLQAGGDPGERPSQALLTPVALDFPCLDSPQAWLSAIGLECYQDNFSKFGLCTFSDVAQLSLEDLPALGITLAGHQKKLLHHIQLLQQHLRQQGSVEV

SEQ ID NO: 407 - protein, 1210 aa, Homo sapiens [sequence omitted]

SEQ ID NO: 408 - protein, 1255 aa, Homo sapiens [sequence omitted]

SEQ ID NO: 409 - protein, 1342 aa, Homo sapiens
  ref <308>: DATABASE ACCESSION NUMBER: GenBank No. NP001973
  ref <309>: DATABASE ENTRY DATE: 2004-12-20
MRANDALQVLGLLFSLARGSEVGNSQAVCPGTLNGLSVTGDAENQYQTLYKLYERCEVVMGNLEIVLTGHNADLSFLQWIREVTGYVLVAMNEFSTLPLPNLRVVRGTQVYDGKFAIFVMLNYNTNSSHALRQLRLTQLTEILSGGVYIEKNDKLCHMDTIDWRDIVRDRDAEIVVKDNGRSCPPCHEVCKGRCWGPGSEDCQTLTKTICAPQCNGHCFGPNPNQCCHDECAGGCSGPQDTDCFACRHFNDSGACVPRCPQPLVYNKLTFQLEPNPHTKYQYGGVCVASCPHNFVVDQTSCVRACPPDKMEVDKNGLKMCEPCGGLCPKACEGTGSGSRFQTVDSSNIDGFVNCTKILGNLDFLITGLNGDPWHKIPALDPEKLNVFRTVREITGYLNIQSWPPHMHNFSVFSNLTTIGGRSLYNRGFSLLIMKNLNVTSLGFRSLKEISAGRIYISANRQLCYHHSLNWTKVLRGPTEERLDIKHNRPRRDCVAEGKVCDPLCSSGGCWGPGPGQCLSCRNYSRGGVCVTHCNFLNGEPREFAHEAECFSCHPECQPMEGTATCNGSGSDTCAQCAHFRDGPHCVSSCPHGVLGAKGPIYKYPDVQNECRPCHENCTQGCKGPELQDCLGQTLVLIGKTHLTMALTVIAGLVVIFMMLGGTFLYWRGRRIQNKRAMRRYLERGESIEPLDPSEKANKVLARIFKETELRKLKVLGSGVFGTVHKGVWIPEGESIKIPVCIKVIEDKSGRQSFQAVTDHMLAIGSLDHAHIVRLLGLCPGSSLQLVTQYLPLGSLLDHVRQHRGALGPQLLLNWGVQIAKGMYYLEEHGMVHRNLAARNVLLKSPSQVQVADFGVADLLPPDDKQLLYSEAKTPIKWMALESIHFGKYTHQSDVWSYGVTVWELMTFGAEPYAGLRLAEVPDLLEKGERLAQPQICTIDVYMVMVKCWMIDENIRPTFKELANEFTRMARDPPRYLVIKRESGPGIAPGPEPHGLTNKKLEEVELEPELDLDLDLEAEEDNLATTTLGSALSLPVGTLNRPRGSQSLLSPSSGYMPMNQGNLGESCQESAVSGSSERCPRPVSLHPMPRGCLASESSEGHVTGSEAELQEKVSMCRSRSRSRSPRPRGDSAYHSQRHSLLTPVTPLSPPGLEEEDVNGYVMPDTHLKGTPSSREGTLSSVGLSSVLGTEEEDEDEEYEYMNRRRRHSPPHPPRPSSLEELGYEYMDVGSDLSASLGSTQSCPLHPVPIMPTAGTTPDEDYEYMNRQRDGGGPGGDYAAMGACPASEQGYEEMRAFQGPGHQAPHVHYARLKTLRSLEATDSAFDNPDYWHSRLFPKANAQRT

SEQ ID NO: 410 - protein, 820 aa, Homo sapiens [sequence omitted]

SEQ ID NO: 411 - protein, 821 aa, Homo sapiens
  ref <308>: DATABASE ACCESSION NUMBER: GenBank No. NP000132
  ref <309>: DATABASE ENTRY DATE: 2004-12-20
MVSWGRFICLVVVTMATLSLARPSFSLVEDTTLEPEEPPTKYQISQPEVYVAAPGESLEVRCLLKDAAVISWTKDGVHLGPNNRTVLIGEYLQIKGATPRDSGLYACTASRTVDSETWYFMVNVTDAISSGDDEDDTDGAEDFVSENSNNKRAPYWTNTEKMEKRLHAVPAANTVKFRCPAGGNPMPTMRWLKNGKEFKQEHRIGGYKVRNQHWSLIMESVVPSDKGNYTCVVENEYGSINHTYHLDVVERSPHRPILQAGLPANASTVVGGDVEFVCKVYSDAQPHIQWIKHVEKNGSKYGPDGLPYLKVLKAAGVNTTDKEIEVLYIRNVTFEDAGEYTCLAGNSIGISFHSAWLTVLPAPGREKEITASPDYLEIAIYCIGVFLIACMVVTVILCRMKNTTKKPDFSSQPAVHKLTKRIPLRRQVTVSAESSSSMNSNTPLVRITTRLSSTADTPMLAGVSEYELPEDPKWEFPRDKLTLGKPLGEGCFGQVVMAEAVGIDKDKPKEAVTVAVKMLKDDATEKDLSDLVSEMEMMKMIGKHKNIINLLGACTQDGPLYVIVEYASKGNLREYLRARRPPGMEYSYDINRVPEEQMTFKDLVSCTYQLARGMEYLASQKCIHRDLAARNVLVTENNVMKIADFGLARDINNIDYYKKTTNGRLPVKWMAPEALFDRVYTHQSDVWSFGVLMWEIFTLGGSPYPGIPVEELFKLLKEGHRMDKPANCTNELYMMMRDCWHAVPSQRPTFKQLVEDLDRILTLTTNEEYLDLSQPLEQYSPSYPDTRSSCSSGDDSVFSPDPMPYEPCLPQYPHINGSVKT

SEQ ID NO: 412 - protein, 806 aa, Homo sapiens
  ref <308>: DATABASE ACCESSION NUMBER: GenBank No. NP000133
  ref <309>: DATABASE ENTRY DATE: 2004-12-20
MGAPACALALCVAVAIVAGASSESLGTEQRVVGRAAEVPGPEPGQQEQLVFGSGDAVELSCPPPGGGPMGPTVWVKDGTGLVPSERVLVGPQRLQVLNASHEDSGAYSCRQRLTQRVLCHFSVRVTDAPSSGDDEDGEDEAEDTGVDTGAPYWTRPERMDKKLLAVPAANTVRFRCPAAGNPTPSISWLKNGREFRGEHRIGGIKLRHQQWSLVMESVVPSDRGNYTCVVENKFGSIRQTYTLDVLERSPHRPILQAGLPANQTAVLGSDVEFHCKVYSDAQPHIQWLKHVEVNGSKVGPDGTPYVTVLKTAGANTTDKELEVLSLHNVTFEDAGEYTCLAGNSIGFSHHSAWLVVLPAEEELVEADEAGSVYAGILSYGVGFFLFILVVAAVTLCRLRSPPKKGLGSPTVHKISRFPLKRQVSLESNASMSSNTPLVRIARLSSGEGPTLANVSELELPADPKWELSRARLTLGKPLGEGCFGQVVMAEAIGIDKDRAAKPVTVAVKMLKDDATDKDLSDLVSEMEMMKMIGKHKNIINLLGACTQGGPLYVLVEYAAKGNLREFLRARRPPGLDYSFDTCKPPEEQLTFKDLVSCAYQVARGMEYLASQKCIHRDLAARNVLVTEDNVMKIADFGLARDVHNLDYYKKTTNGRLPVKWMAPEALFDRVYTHQSDVWSFGVLLWEIFTLGGSPYPGIPVEELFKLLKEGHRMDKPANCTHDLYMIMRECWHAAPSQRPTFKQLVEDLDRVLTVTSTDEYLDLSAPFEQYSPGGQDTPSSSSSGDDSVFAHDLLPPAPPSSGGSRT

SEQ ID NO: 413 - protein, 802 aa, Homo sapiens
  ref <308>: DATABASE ACCESSION NUMBER: GenBank No. NP002002
  ref <309>: DATABASE ENTRY DATE: 2004-10-28
MRLLLALLGVLLSVPGPPVLSLEASEEVELEPCLAPSLEQQEQELTVALGQPVRLCCGRAERGGHWYKEGSRLAPAGRVRGWRGRLEIASFLPEDAGRYLCLARGSMIVLQNLTLITGDSLTSSNDDEDPKSHRDPSNRHSYPQQAPYWTHPQRMEKKLHAVPAGNTVKFRCPAAGNPTPTIRWLKDGQAFHGENRIGGIRLRHQHWSLVMESVVPSDRGTYTCLVENAVGSIRYNYLLDVLERSPHRPILQAGLPANTTAVVGSDVELLCKVYSDAQPHIQWLKHIVINGSSFGADGFPYVQVLKTADINSSEVEVLYLRNVSAEDAGEYTCLAGNSIGLSYQSAWLTVLPEEDPTWTAAAPEARYTDIILYASGSLALAVLLLLAGLYRGQALHGRHPRPPATVQKLSRFPLARQFSLESGSSGKSSSSLVRGVRLSSSGPALLAGLVSLDLPLDPLWEFPRDRLVLGKPLGEGCFGQVVRAEAFGMDPARPDQASTVAVKMLKDNASDKDLADLVSEMEVMKLIGRHKNIINLLGVCTQEGPLYVIVECAAKGNLREFLRARRPPGPDLSPDGPRSSEGPLSFPVLVSCAYQVARGMQYLESRKCIHRDLAARNVLVTEDNVMKIADFGLARGVHHIDYYKKTSNGRLPVKWMAPEALFDRVYTHQSDVWSFGILLWEIFTLGGSPYPGIPVEELFSLLREGHRMDRPPHCPPELYGLMRECWHAAPSQRPTFKQLVEALDKVLLAVSEEYLDLRLTFGPYSPSGGDASSTCSSSDSVFSHDPLPLGSSSFPFGSGVQT

SEQ ID NO: 414 - protein, 1390 aa, Homo sapiens
  ref <308>: DATABASE ACCESSION NUMBER: GenBank No. NP000236
  ref <309>: DATABASE ENTRY DATE: 2004-10-28
MKAPAVLAPGILVLLFTLVQRSNGECKEALAKSEMNVNMKYQLPNFTAETPIQNVILHEHHIFLGATNYIYVLNEEDLQKVAEYKTGPVLEHPDCFPCQDCSSKANLSGGVWKDNINMALVVDTYYDDQLISCGSVNRGTCQRHVFPHNHTADIQSEVHCIFSPQIEEPSQCPDCVVSALGAKVLSSVKDRFINFFVGNTINSSYFPDHPLHSISVRRLKETKDGFMFLTDQSYIDVLPEFRDSYPIKYVHAFESNNFIYFLTVQRETLDAQTFHTRIIRFCSINSGLHSYMEMPLECILTEKRKKRSTKKEVFNILQAAYVSKPGAQLARQIGASLNDDILFGVFAQSKPDSAEPMDRSAMCAFPIKYVNDFFNKIVNKNNVRCLQHFYGPNHEHCFNRTLLRNSSGCEARRDEYRTEFTTALQRVDLFMGQFSEVLLTSISTFIKGDLTIANLGTSEGRFMQVVVSRSGPSTPHVNFLLDSHPVSPEVIVEHTLNQNGYTLVITGKKITKIPLNGLGCRHFQSCSQCLSAPPFVQCGWCHDKCVRSEECLSGTWTQQICLPAIYKVFPNSAPLEGGTRLTICGWDFGFRRNNKFDLKKTRVLLGNESCTLTLSESTMNTLKCTVGPAMNKHFNMSIIISNGHGTTQYSTFSYVDPVITSISPKYGPMAGGTLLTLTGNYLNSGNSRHISIGGKTCTLKSVSNSILECYTPAQTISTEFAVKLKIDLANRETSIFSYREDPIVYEIHPTKSFISGGSTITGVGKNLNSVSVPRMVINVHEAGRNFTVACQHRSNSEIICCTTPSLQQLNLQLPLKTKAFFMLDGILSKYFDLIYVHNPVFKPFEKPVMISMGNENVLEIKGNDIDPEAVKGEVLKVGNKSCENIHLHSEAVLCTVPNDLLKLNSELNIEWKQAISSTVLGKVIVQPDQNFTGLIAGVVSISTALLLLLGFFLWLKKRKQIKDLGSELVRYDARVHTPHLDRLVSARSVSPTTEMVSNESVDYRATFPEDQFPNSSQNGSCRQVQYPLTDMSPILTSGDSDISSPLLQNTVHIDLSALNPELVQAVQHVVIGPSSLIVHFNEVIGRGHFGCVYHGTLLDNDGKKIHCAVKSLNRITDIGEVSQFLTEGIIMKDFSHPNVLSLLGICLRSEGSPLVVLPYMKHGDLRNFIRNETHNPTVKDLIGFGLQVAKGMKYLASKKFVHRDLAARNCMLDEKFTVKVADFGLARDMYDKEYYSVHNKTGAKLPVKWMALESLQTQKFTTKSDVWSFGVLLWELMTRGAPPYPDVNTFDITVYLLQGRRLLQPEYCPDPLYEVMLKCWHPKAEMRPSFSELVSRISAIFSTFIGEHYVHVNATYVNVKCVAPYPSLLSSEDNADDEVDTRPASFWETS

SEQ ID NO: 415 - protein, 1400 aa, Homo sapiens
  ref <308>: DATABASE ACCESSION NUMBER: GenBank No. NP002438
  ref <309>: DATABASE ENTRY DATE: 2004-10-28
MELLPPLPQSFLLLLLLPAKPAAGEDWQCPRTPYAASRDFDVKYVVPSFSAGGLVQAMVTYEGDRNESAVFVAIRNRLHVLGPDLKSVQSLATGPAGDPGCQTCAACGPGPHGPPGDTDTKVLVLDPALPALVSCGSSLQGRCFLHDLEPQGTAVHLAAPACLFSAHHNRPDDCPDCVASPLGTRVTVVEQGQASYFYVASSLDAAVAGSFSPRSVSIRRLKADASGFAPGFVALSVLPKHLVSYSIEYVHSFHTGAFVYFLTVQPASVTDDPSALHTRLARLSATEPELGDYRELVLDCRFAPKRRRRGAPEGGQPYPVLQVAHSAPVGAQLATELSIAEGQEVLFGVFVTGKDGGPGVGPNSVVCAFPIDLLDTLIDEGVERCCESPVHPGLRRGLDFFQSPSFCPNPPGLEALSPNTSCRHFPLLVSSSFSRVDLFNGLLGPVQVTALYVTRLDNVTVAHMGTMDGRILQVELVRSLNYLLYVSNFSLGDSGQPVQRDVSRLGDHLLFASGDQVFQVPIRGPGCRHFLTCGRCLRAWHFMGCGWCGNMCGQQKECPGSWQQDHCPPKLTEFHPHSGPLRGSTRLTLCGSNFYLHPSGLVPEGTHQVTVGQSPCRPLPKDSSKLRPVPRKDFVEEFECELEPLGTQAVGPTNVSLTVTNMPPGKHFRVDGTSVLRGFSFMEPVLIAVQPLFGPRAGGTCLTLEGQSLSVGTSRAVLVNGTECLLARVSEGQLLCATPPGATVASVPLSLQVGGAQVPGSWTFQYREDPVVLSISPNCGYINSHITICGQHLTSAWHLVLSFHDGLRAVESRCERQLPEQQLCRLPEYVVRDPQGWVAGNLSARGDGAAGFTLPGFRFLPPPHPPSANLVPLKPEEHAIKFEYIGLGAVADCVGINVTVGGESCQHEFRGDMVVCPLPPSLQLGQDGAPLQVCVDGECHILGRVVRPGPDGVPQSTLLGILLPLLLLVAALATALVFSYWWRRKQLVLPPNLNDLASLDQTAGATPLPILYSGSDYRSGLALPAIDGLDSTTCVHGASFSDSEDESCVPLLRKESIQLRDLDSALLAEVKDVLIPHERVVTHSDRVIGKGHFGVVYHGEYIDQAQNRIQCAIKSLSRITEMQQVEAFLREGLLMRGLNHPNVLALIGIMLPPEGLPHVLLPYMCHGDLLQFIRSPQRNPTVKDLISFGLQVARGMEYLAEQKFVHRDLAARNCMLDESFTVKVADFGLARDILDREYYSVQQHRHARLPVKWMALESLQTYRFTTKSDVWSFGVLLWELLTRGAPPYRHIDPFDLTHFLAQGRRLPQPEYCPDSLYQVMQQCWEADPAVRPTFRVLVGEVEQIVSALLGDHYVQLPATYMNLGPSTSHEMNVRPEQPQFSPMPGNVRRPRPLSEPPRPT

SEQ ID NO: 416 - protein, 972 aa, Homo sapiens
  ref <308>: DATABASE ACCESSION NUMBER: GenBank No. NP005202
  ref <309>: DATABASE ENTRY DATE: 2004-10-26
MGPGVLLLLLVATAWHGQGIPVIEPSVPELVVKPGATVTLRCVGNGSVEWDGPPSPHWTLYSDGSSSILSTNNATFQNTGTYRCTEPGDPLGGSAAIHLYVKDPARPWNVLAQEVVVFEDQDALLPCLLTDPVLEAGVSLVRVRGRPLMRHTNYSFSPWHGFTIHRAKFIQSQDYQCSALMGGRKVMSISIRLKVQKVIPGPPALTLVPAELVRIRGEAAQIVCSASSVDVNFDVFLQHNNTKLAIPQQSDFHNNRYQKVLTLNLDQVDFQHAGNYSCVASNVQGKHSTSMFFRVVESAYLNLSSEQNLIQEVTVGEGLNLKVMVEAYPGLQGFNWTYLGPFSDHQPEPKLANATTKDTYRHTFTLSLPRLKPSEAGRYSFLARNPGGWRALTFELTLRYPPEVSVIWTFINGSGTLLCAASGYPQPNVTWLQCSGHTDRCDEAQVLQVWDDPYPEVLSQEPFHKVTVQSLLTVETLEHNQTYECRAHNSVGSGSWAFIPISAGAHTHPPDEFLFTPVVVACMSIMALLLLLLLLLLYKYKQKPKYQVRWKIIESYEGNSYTFIDPTQLPYNEKWEFPRNNLQFGKTLGAGAFGKVVEATAFGLGKEDAVLKVAVKMLKSTAHADEKEALMSELKIMSHLGQHENIVNLLGACTHGGPVLVITEYCCYGDLLNFLRRKAEAMLGPSLSPGQDPEGGVDYKNIHLEKKYVRRDSGFSSQGVDTYVEMRPVSTSSNDSFSEQDLDKEDGRPLELRDLLHFSSQVAQGMAFLASKNCIHRDVAARNVLLTNGHVAKIGDFGLARDIMNDSNYIVKGNARLPVKWMAPESIFDCVYTVQSDVWSYGILLWEIFSLGLNPYPGILVNSKFYKLVKDGYQMAQPAFAPKNIYSIMQACWALEPTHRPTFQQICSFLQEQAQEDRRERDYTNLPSSSRSGGSGSSSSELEEESSSEHLTCCEQGDIAQPLLQPNNYQFC

SEQ ID NO: 417 - protein, 993 aa, Homo sapiens
  ref <308>: DATABASE ACCESSION NUMBER: GenBank No. NP004110
  ref <309>: DATABASE ENTRY DATE: 2005-01-22
MPALARDAGTVPLLVVFSAMIFGTITNQDLPVIKCVLINHKNNDSSVGKSSSYPMVSESPEDLGCALRPQSSGTVYEAAAVEVDVSASITLQVLVDAPGNISCLWVFKHSSLNCQPHFDLQNRGVVSMVILKMTETQAGEYLLFIQSEATNYTILFTVSIRNTLLYTLRRPYFRKMENQDALVCISESVPEPIVEWVLCDSQGESCKEESPAVVKKEEKVLHELFGTDIRCCARNELGRECTRLFTIDLNQTPQTTLPQLFLKVGEPLWIRCKAVHVNHGFGLTWELENKALEEGNYFEMSTYSTNRTMIRILFAFVSSVARNDTGYYTCSSSKHPSQSALVTIVGKGFINATNSSEDYEIDQYEEFCFSVRFKAYPQIRCTWTFSRKSFPCEQKGLDNGYSISKFCNHKHQPGEYIFHAENDDAQFTKMFTLNIRRKPQVLAEASASQASCFSDGYPLPSWTWKKCSDKSPNCTEEITEGVWNRKANRKVFGQWVSSSTLNMSEAIKGFLVKCCAYNSLGTSCETILLNSPGPFPFIQDNISFYATIGVCLLFIVVLTLLICHKYKKQFRYESQLQMVQVTGSSDNEYFYVDFREYEYDLKWEFPRENLEFGKVLGSGAFGKVMNATAYGISKTGVSIQVAVKMLKEKADSSEREALMSELKMMTQLGSHENIVNLLGACTLSGPIYLIFEYCCYGDLLNYLRSKREKFHRTWTEIFKEHNFSFYPTFQSHPNSSMPGSREVQIHPDSDQISGLHGNSFHSEDEIEYENQKRLEEEEDLNVLTFEDLLCFAYQVAKGMEFLEFKSCVHRDLAARNVLVTHGKVVKICDFGLARDIMSDSNYVVRGNARLPVKWMAPESLFEGIYTIKSDVWSYGILLWEIFSLGVNPYPGIPVDANFYKLIQNGFKMDQPFYATEEIYIIMQSCWAFDSRKRPSFPNLTSFLGCQLADAEEAMYQNVDGRVSECPHTYQNRRPFSREMDLGLLSPQAQVEDS

SEQ ID NO: 418 - protein, 1363 aa, Homo sapiens
  ref <308>: DATABASE ACCESSION NUMBER: GenBank No. NP000213
  ref <309>: DATABASE ENTRY DATE: 2004-12-20
MQRGAALCLRLWLCLGLLDGLVSDYSMTPPTLNITEESHVIDTGDSLSISCRGQHPLEWAWPGAQEAPATGDKDSEDTGVVRDCEGTDARPYCKVLLLHEVHANDTGSYVCYYKYIKARIEGTTAASSYVFVRDFEQPFINKPDTLLVNRKDAMWVPCLVSIPGLNVTLRSQSSVLWPDGQEVVWDDRRGMLVSTPLLHDALYLQCETTWGDQDFLSNPFLVHITGNELYDIQLLPRKSLELLVGEKLVLNCTVWAEFNSGVTFDWDYPGKQAERGKWVPERRSQQTHTELSSILTIHNVSQHDLGSYVCKANNGIQRFRESTEVIVHENPFISVEWLKGPILEATAGDELVKLPVKLAAYPPPEFQWYKDGKALSGRHSPHALVLKEVTEASTGTYTLALWNSAAGLRRNISLELVVNVPPQIHEKEASSPSIYSRHSRQALTCTAYGVPLPLSIQWHWRPWTPCKMFAQRSLRRRQQQDLMPQCRDWRAVTTQDAVNPIESLDTWTEFVEGKNKTVSKLVIQNANVSAMYKCVVSNKVGQDERLIYFYVTTIPDGFTIESKPSEELLEGQPVLLSCQADSYKYEHLRWYRLNLSTLHDAHGNPLLLDCKNVHLFATPLAASLEEVAPGARHATLSLSIPRVAPEHEGHYVCEVQDRRSHDKHCHKKYLSVQALEAPRLTQNLTDLLVNVSDSLEMQCLVAGAHAPSIVWYKDERLLEEKSGVDLADSNQKLSIQRVREEDAGPYLCSVCRPKGCVNSSASVAVEGSEDKGSMEIVILVGTGVIAVFFWVLLLLIFCNMRRPAHADIKTGYLSIIMDPGEVPLEEQCEYLSYDASQWEFPRERLHLGRVLGYGAFGKVVEASAFGIHKGSSCDTVAVKMLKEGATASEQRALMSELKILIHIGNHLNVVNLLGACTKPQGPLMVIVEFCKYGNLSNFLRAKRDAFSPCAEKSPEQRGRFRAMVELARLDRRRPGSSDRVLFARFSKTEGGARRASPDQEAEDLWLSPLTMEDLVCYSFQVARGMEFLASRKCIHRDLAARNILLSESDVVKICDFGLARDIYKDPDYVRKGSARLPLKWMAPESIFDKVYTTQSDVWSFGVLLWEIFSLGASPYPGVQINEEFCQRVRDGTRMRAPELATPAIRHIMLNCWSGDPKARPAFSELVEILGDLLQGRGLQEEEEVCMAPRSSQSSEEGSFSQVSTMALHIAQADAEDSPPSLQRHSLAARYYNWVSFPGCLARGAETRGSSRMKTFEEFPMTPTTYKGSVDNQTDSGMVLASEEFEQIESRHRQESGFSCKGPGQNVAVTRAHPDSQGRRRRPERGARGGQVFYNSEYGELSEPSEEDHCSPSARVTFFTDNSY

SEQ ID NO: 419 - protein, 1089 aa, Homo sapiens
  ref <308>: DATABASE ACCESSION NUMBER: GenBank No. NP006197
  ref <309>: DATABASE ENTRY DATE: 2004-10-26
MGTSHPAFLVLGCLLTGLSLILCQLSLPSILPNENEKVVQLNSSFSLRCFGESEVSWQYPMSEEESSDVEIRNEENNSGLFVTVLEVSSASAAHTGLYTCYYNHTQTEENELEGRHIYIYVPDPDVAFVPLGMTDYLVIVEDDDSAIIPCRTTDPETPVTLHNSEGVVPASYDSRQGFNGTFTVGPYICEATVKGKKFQTIPFNVYALKATSELDLEMEALKTVYKSGETIVVTCAVFNNEVVDLQWTYPGEVKGKGITMLEEIKVPSIKLVYTLTVPEATVKDSGDYECAARQATREVKEMKKVTISVHEKGFIEIKPTFSQLEAVNLHEVKHFVVEVRAYPPPRISWLKNNLTLIENLTEITTDVEKIQEIRYRSKLKLIRAKEEDSGHYTIVAQNEDAVKSYTFELLTQVPSSILDLVDDHHGSTGGQTVRCTAEGTPLPDIEWMICKDIKKCNNETSWTILANNVSNIITEIHSRDRSTVEGRVTFAKVEETIAVRCLAKNLLGAENRELKLVAPTLRSELTVAAAVLVLLVIVIISLIVLVVIWKQKPRYEIRWRVIESISPDGHEYIYVDPMQLPYDSRWEFPRDGLVLGRVLGSGAFGKVVEGTAYGLSRSQPVMKVAVKMLKPTARSSEKQALMSELKIMTHLGPHLNIVNLLGACTKSGPIYIITEYCFYGDLVNYLHKNRDSFLSHHPEKPKKELDIFGLNPADESTRSYVILSFENNGDYMDMKQADTTQYVPMLERKEVSKYSDIQRSLYDRPASYKKKSMLDSEVKNLLSDDNSEGLTLLDLLSFTYQVARGMEFLASKNCVHRDLAARNVLLAQGKIVKICDFGLARDIMHDSNYVSKGSTFLPVKWMAPESIFDNLYTTLSDVWSYGILLWEIFSLGGTPYPGMMVDSTFYNKIKSGYRMAKPDHATSEVYEIMVKCWNSEPEKRPSFYHLSEIVENLLPGQYKKSYEKIHLDFLKSDHPAVARMRVDSDNAYIGVTYKNEEDKLKDWEGGLDEQRLSADSGYIIPLPDIDPVPEEEDLGKRNRHSSQTSEESAIETGSSSSTFIKREDETIEDIDMMDDIGIDSSDLVEDSFL

SEQ ID NO: 420 - protein, 1106 aa, Homo sapiens
  ref <308>: DATABASE ACCESSION NUMBER: GenBank No. NP002600
  ref <309>: DATABASE ENTRY DATE: 2004-10-26
MRLPGAMPALALKGELLLLSLLLLLEPQISQGLVVTPPGPELVLNVSSTFVLTCSGSAPVVWERMSQEPPQEMAKAQDGTFSSVLTLTNLTGLDTGEYFCTHNDSRGLETDERKRLYIFVPDPTVGFLPNDAEELFIFLTEITEITIPCRVTDPQLVVTLHEKKGDVALPVPYDHQRGFSGIFEDRSYICKTTIGDREVDSDAYYVYRLQVSSINVSVNAVQTVVRQGENITLMCIVIGNEVVNFEWTYPRKESGRLVEPVTDFLLDMPYHIRSILHIPSAELEDSGTYTCNVTESVNDHQDEKAINITVVESGYVRLLGEVGTLQFAELHRSRTLQVVFEAYPPPTVLWFKDNRTLGDSSAGEIALSTRNVSETRYVSELTLVRVKVAEAGHYTMRAFHEDAEVQLSFQLQINVPVRVLELSESHPDSGEQTVRCRGRGMPQPNIIWSACRDLKRCPRELPPTLLGNSSEEESQLETNVTYWEEEQEFEVVSTLRLQHVDRPLSVRCTLRNAVGQDTQEVIVVPHSLPFKVVVISAILALVVLTIISLIILIMLWQKKPRYEIRWKVIESVSSDGHEYIYVDPMQLPYDSTWELPRDQLVLGRTLGSGAFGQVVEATAHGLSHSQATMKVAVKMLKSTARSSEKQALMSELKIMSHLGPHLNVVNLLGACTKGGPIYIITEYCRYGDLVDYLHRNKHTFLQHHSDKRRPPSAELYSNALPVGLPLPSHVSLTGESDGGYMDMSKDESVDYVPMLDMKGDVKYADIESSNYMAPYDNYVPSAPERTCRATLINESPVLSYMDLVGFSYQVANGMEFLASKNCVHRDLAARNVLICEGKLVKICDFGLARDIMRDSNYISKGSTFLPLKWMAPESIFNSLYTTLSDVWSFGILLWEIFTLGGTPYPELPMNEQFYNAIKRGYRMAQPAHASDEIYEIMQKCWEEKFEIRPPFSQLVLLLERLLGEGYKKKYQQVDEEFLRSDHPAILRSQARLPGFHGLRSPLDTSSVLYTAVQPNEGDNDYIIPLPDPKPEVADEGPLEGSPSLASSTLNEVNTSSTISCDSPLEPQDEPEPEPQLELQVEPEPELEQLPDSGCPAPRAEAEDSFL

SEQ ID NO: 421 - protein, 404 aa, Homo sapiens
  ref <308>: DATABASE ACCESSION NUMBER: GenBank No. NP001127
  ref <309>: DATABASE ENTRY DATE: 2005-10-31
MAAGTAVGAWVLVLSLWGAVVGAQNITARIGEPLVLKCKGAPKKPPQRLEWKLNTGRTEAWKVLSPQGGGPWDSVARVLPNGSLFLPAVGIQDEGIFRCQAMNRNGKETKSNYRVRVYQIPGKPEIVDSASELTAGVPNKVGTCVSEGSYPAGTLSWHLDGKPLVPNEKGVSVKEQTRRHPETGLFTLQSELMVTPARGGDPRPTFSCSFSPGLPRHRALRTAPIQPRVWEPVPLEEVQLVVEPEGGAVAPGGTVTLTCEVPAQPSPQIHWMKDGVPLPLPPSPVLILPEIGPQDQGTYSCVATHSSHGPQESRAVSISIIEPGEEGPTAGSVGGSGLGTLALALGILGGLGTAALLIGVILWQRRQRRGEERKAPENQEEEEERAELNQSEEPEAGESSTGGP

SEQ ID NO: 422 - protein, 1124 aa, Homo sapiens
  ref <308>: DATABASE ACCESSION NUMBER: GenBank No. NP000450
  ref <309>: DATABASE ENTRY DATE: 2004-10-26
MDSLASLVLCGVSLLLSGTVEGAMDLILINSLPLVSDAETSLTCIASGWRPHEPITIGRDFEALMNQHQDPLEVTQDVTREWAKKVVWKREKASKINGAYFCEGRVRGEAIRIRTMKMRQQASFLPATLTMTVDKGDNVNISFKKVLIKEEDAVIYKNGSFIHSVPRHEVPDILEVHLPHAQPQDAGVYSARYIGGNLFTSAFTRLIVRRCEAQKWGPECNHLCTACMNNGVCHEDTGECICPPGFMGRTCEKACELHTFGRTCKERCSGQEGCKSYVFCLPDPYGCSCATGWKGLQCNEACHPGFYGPDCKLRCSCNNGEMCDRFQGCLCSPGWQGLQCEREGIPRMTPKIVDLPDHIEVNSGKFNPICKASGWPLPTNEEMTLVKPDGTVLHPKDFNHTDHFSVAIFTIHRILPPDSGVWVCSVNTVAGMVEKPFNISVKVLPKPLNAPNVIDTGHNFAVINISSEPYFGDGPIKSKKLLYKPVNHYEAWQHIQVTNEIVTLNYLEPRTEYELCVQLVRRGEGGEGHPGPVRRFTTASIGLPPPRGLNLLPKSQTTLNLTWQPIFPSSEDDFYVEVERRSVQKSDQQNIKVPGNLTSVLLNNLHPREQYVVRARVNTKAQGEWSEDLTAWTLSDILPPQPENIKISNITHSSAVISWTILDGYSISSITIRYKVQGKNEDQHVDVKIKNATIIQYQLKGLEPETAYQVDIFAENNIGSSNPAFSHELVTLPESQAPADLGGGKMLLIAILGSAGMTCLTVLLAFLIILQLKRANVQRRMAQAFQNVREEPAVQFNSGTLALNRKVKNNPDPTIYPVLDWNDIKFQDVIGEGNFGQVLKARIKKDGLRMDAAIKRMKEYASKDDHRDFAGELEVLCKLGHHPNIINLLGACEHRGYLYLAIEYAPHGNLLDFLRKSRVLETDPAFAIANSTASTLSSQQLLHFAADVARGMDYLSQKQFIHRDLAARNILVGENYVAKIADFGLSRGQEVYVKKTMGRLPVRWMAIESLNYSVYTTNSDVWSYGVLLWEIVSLGGTPYCGMTCAELYEKLPQGYRLEKPLNCDDEVYDLMRQCWREKPYERPSFAQILVSLNRMLEERKTYVNTTLYEKFTYAGIDCSAEEAA

SEQ ID NO: 423 - protein, 1138 aa, Homo sapiens
  ref <308>: DATABASE ACCESSION NUMBER: GenBank No. NP005415
  ref <309>: DATABASE ENTRY DATE: 2004-12-18
MVWRVPPFLLPILFLASHVGAAVDLTLLANLRLTDPQRFFLTCVSGEAGAGRGSDAWGPPLLLEKDDRIVRTPPGPPLRLARNGSHQVTLRGFSKPSDLVGVFSCVGGAGARRTRVIYVHNSPGAHLLPDKVTHTVNKGDTAVLSARVHKEKQTDVIWKSNGSYFYTLDWHEAQDGRFLLQLPNVQPPSSGIYSATYLEASPLGSAFFRLIVRGCGAGRWGPGCTKECPGCLHGGVCHDHDGECVCPPGFTGTRCEQACREGRFGQSCQEQCPGISGCRGLTFCLPDPYGCSCGSGWRGSQCQEACAPGHFGADCRLQCQCQNGGTCDRFSGCVCPSGWHGVHCEKSDRIPQILNMASELEFNLETMPRINCAAAGNPFPVRGSIELRKPDGTVLLSTKAIVEPEKTTAEFEVPRLVLADSGFWECRVSTSGGQDSRRFKVNVKVPPVPLAAPRLLTKQSRQLVVSPLVSFSGDGPISTVRLHYRPQDSTMDWSTIVVDPSENVTLMNLRPKTGYSVRVQLSRPGEGGEGAWGPPTLMTTDCPEPLLQPWLEGWHVEGTDRLRVSWSLPLVPGPLVGDGFLLRLWDGTRGQERRENVSSPQARTALLTGLTPGTHYQLDVQLYHCTLLGPASPPAHVLLPPSGPPAPRHLHAQALSDSEIQLTWKHPEALPGPISKYVVEVQVAGGAGDPLWIDVDRPEETSTIIRGLNASTRYLFRMRASIQGLGDWSNTVEESTLGNGLQAEGPVQESRAAEEGLDQQLILAVVGSVSATCLTILAALLTLVCIRRSCLHRRRTFTYQSGSGEETILQFSSGTLTLTRRPKLQPEPLSYPVLEWEDITFEDLIGEGNFGQVIRAMIKKDGLKMNAAIKMLKEYASENDHRDFAGELEVLCKLGHHPNIINLLGACKNRGYLYIAIEYAPYGNLLDFLRKSRVLETDPAFAREHGTASTLSSRQLLRFASDAANGMQYLSEKQFIHRDLAARNVLVGENLASKIADFGLSRGEEVYVKKTMGRLPVRWMAIESLNYSVYTTKSDVWSFGVLLWEIVSLGGTPYCGMTCAELYEKLPQGYRMEQPRNCDDEVYELMRQCWRDRPYERPPFAQIALQLGRMLEARKAYVNMSLFENFTYAGIDATAEEA

SEQ ID NO: 424 - protein, 455 aa, Homo sapiens
  ref <308>: DATABASE ACCESSION NUMBER: GenBank No. NP001056
  ref <309>: DATABASE ENTRY DATE: 2004-10-27
MGLSTVPDLLLPLVLLELLVGIYPSGVIGLVPHLGDREKRDSVCPQGKYIHPQNNSICCTKCHKGTYLYNDCPGPGQDTDCRECESGSFTASENHLRHCLSCSKCRKEMGQVEISSCTVDRDTVCGCRKNQYRHYWSENLFQCFNCSLCLNGTVHLSCQEKQNTVCTCHAGFFLRENECVSCSNCKKSLECTKLCLPQIENVKGTEDSGTTVLLPLVIFFGLCLLSLLFIGLMYRYQRWKSKLYSIVCGKSTPEKEGELEGTTTKPLAPNPSFSPTPGFTPTLGFSPVPSSTFTSSSTYTPGDCPNFAAPRREVAPPYQGADPILATALASDPIPNPLQKWEDSAHKPQSLDTDDPATLYAVVENVPPLRWKEFVRRLGLSDHEIDRLELQNGRCLREAQYSMLATWRRRTPRREATLELLGRVLRDMDLLGCLEDIEEALCGPAALPPAPSLLR

SEQ ID NO: 425 - protein, 461 aa, Homo sapiens
  ref <308>: DATABASE ACCESSION NUMBER: GenBank No. NP001057
  ref <309>: DATABASE ENTRY DATE: 2004-10-26
MAPVAVWAALAVGLELWAAAHALPAQVAFTPYAPEPGSTCRLREYYDQTAQMCCSKCSPGQHAKVFCTKTSDTVCDSCEDSTYTQLWNWVPECLSCGSRCSSDQVETQACTREQNRICTCRPGWYCALSKQEGCRLCAPLRKCRPGFGVARPGTETSDVVCKPCAPGTFSNTTSSTDICRPHQICNVVAIPGNASMDAVCTSTSPTRSMAPGAVHLPQPVSTRSQHTQPTPEPSTAPSTSFLLPMGPSPPAEGSTGDFALPVGLIVGVTALGLLIIGVVNCVIMTQVKKKPLCLQREAKVPHLPADKARGTQGPEQQHLLITAPSSSSSSLESSASALDRRAPTRNQPQAPGVEASGAGEARASTGSSDSSPGGHGTQVNVTCIVNVCSSSDHSSQCSSQASSTMGDTDSSPSESPKDEQVPFSKEECAFRSQLETPETLLGSTEEKPLPLGVPDAGMKPS

SEQ ID NO: 426 - protein, 1338 aa, Homo sapiens
  ref <308>: DATABASE ACCESSION NUMBER: GenBank No. NP002010
  ref <309>: DATABASE ENTRY DATE: 2004-10-28
MVSYWDTGVLLCALLSCLLLTGSSSGSKLKDPELSLKGTQHIMQAGQTLHLQCRGEAAHKWSLPEMVSKESERLSITKSACGRNGKQFCSTLTLNTAQANHTGFYSCKYLAVPTSKKKETESAIYIFISDTGRPFVEMYSEIPEIIHMTEGRELVIPCRVTSPNITVTLKKFPLDTLIPDGKRIIWDSRKGFIISNATYKEIGLLTCEATVNGHLYKTNYLTHRQTNTIIDVQISTPRPVKLLRGHTLVLNCTATTPLNTRVQMTWSYPDEKNKRASVRRRIDQSNSHANIFYSVLTIDKMQNKDKGLYTCRVRSGPSFKSVNTSVHIYDKAFITVKHRKQQVLETVAGKRSYRLSMKVKAFPSPEVVWLKDGLPATEKSARYLTRGYSLIIKDVTEEDAGNYTILLSIKQSNVFKNLTATLIVNVKPQIYEKAVSSFPDPALYPLGSRQILTCTAYGIPQPTIKWFWHPCNHNHSEARCDFCSNNEESFILDADSNMGNRIESITQRMAIIEGKNKMASTLVVADSRISGIYICIASNKVGTVGRNISFYITDVPNGFHVNLEKMPTEGEDLKLSCTVNKFLYRDVTWILLRTVNNRTMHYSISKQKMAITKEHSITLNLTIMNVSLQDSGTYACRARNVYTGEEILQKKEITIRDQEAPYLLRNLSDHTVAISSSTTLDCHANGVPEPQITWFKNNHKIQQEPGIILGPGSSTLFIERVTEEDEGVYHCKATNQKGSVESSAYLTVQGTSDKSNLELITLTCTCVAATLFWLLLTLLIRKMKRSSSEIKTDYLSIIMDPDEVPLDEQCERLPYDASKWEFARERLKLGKSLGRGAFGKVVQASAFGIKKSPTCRTVAVKMLKEGATASEYKALMTELKILTHIGHHLNVVNLLGACTKQGGPLMVIVEYCKYGNLSNYLKSKRDLFFLNKDAALHMEPKKEKMEPGLEQGKKPRLDSVTSSESFASSGFQEDKSLSDVEEEEDSDGFYKEPITMEDLISYSFQVARGMEFLSSRKCIHRDLAARNILLSENNVVKICDFGLARDIYKNPDYVRKGDTRLPLKWMAPESIFDKIYSTKSDVWSYGVLLWEIFSLGGSPYPGVQMDEDFCSRLREGMRMRAPEYSTPEIYQIMLDCWHRDPKERPRFAELVEKLGDLLQANVQQDGKDYIPINAILTGNSGFTYSTPAFSEDFFKESISAPKFNSGSSDDVRYVNAFKFMSLERIKTFEELLPNATSMFDDYQGDSSTLLASPMLKRFTWTDSKPKASLKIDLRVTSKSKESGLSDVSRPSFCHSSCGHVSEGKRRFTYDHAELERKIACCSPPPDYNSVVLYSTPPI

SEQ ID NO: 427 - protein, 1356 aa, Homo sapiens
  ref <308>: DATABASE ACCESSION NUMBER: GenBank No. NP002244
  ref <309>: DATABASE ENTRY DATE: 2004-10-26
MQSKVLLAVALWLCVETRAASVGLPSVSLDLPRLSIQKDILTIKANTTLQITCRGQRDLDWLWPNNQSGSEQRVEVTECSDGLFCKTLTIPKVIGNDTGAYKCFYRETDLASVIYVYVQDYRSPFIASVSDQHGVVYITENKNKTVVIPCLGSISNLNVSLCARYPEKRFVPDGNRISWDSKKGFTIPSYMISYAGMVFCEAKINDESYQSIMYIVVVVGYRIYDVVLSPSHGIELSVGEKLVLNCTARTELNVGIDFNWEYPSSKHQHKKLVNRDLKTQSGSEMKKFLSTLTIDGVTRSDQGLYTCAASSGLMTKKNSTFVRVHEKPFVAFGSGMESLVEATVGERVRIPAKYLGYPPPEIKWYKNGIPLESNHTIKAGHVLTIMEVSERDTGNYTVILTNPISKEKQSHVVSLVVYVPPQIGEKSLISPVDSYQYGTTQTLTCTVYAIPPPHHIHWYWQLEEECANEPSQAVSVTNPYPCEEWRSVEDFQGGNKIEVNKNQFALIEGKNKTVSTLVIQAANVSALYKCEAVNKVGRGERVISFHVTRGPEITLQPDMQPTEQESVSLWCTADRSTFENLTWYKLGPQPLPIHVGELPTPVCKNLDTLWKLNATMFSNSTNDILIMELKNASLQDQGDYVCLAQDRKTKKRHCVVRQLTVLERVAPTITGNLENQTTSIGESIEVSCTASGNPPPQIMWFKDNETLVEDSGIVLKDGNRNLTIRRVRKEDEGLYTCQACSVLGCAKVEAFFIIEGAQEKTNLEIIILVGTAVIAMFFWLLLVIILRTVKRANGGELKTGYLSIVMDPDELPLDEHCERLPYDASKWEFPRDRLKLGKPLGRGAFGQVIEADAFGIDKTATCRTVAVKMLKEGATHSEHRALMSELKILIHIGHHLNVVNLLGACTKPGGPLMVIVEFCKFGNLSTYLRSKRNEFVPYKTKGARFRQGKDYVGAIPVDLKRRLDSITSSQSSASSGFVEEKSLSDVEEEEAPEDLYKDFLTLEHLICYSFQVAKGMEFLASRKCIHRDLAARNILLSEKNVVKICDFGLARDIYKDPDYVRKGDARLPLKWMAPETIFDRVYTIQSDVWSFGVLLWEIFSLGASPYPGVKIDEEFCRRLKEGTRMRAPDYTTPEMYQTMLDCWHGEPSQRPTFSELVEHLGNLLQANAQQDGKDYIVLPISETLSMEEDSGLSLPTSPVSCMEEEEVCDPKFHYDNTAGISQYLQNSKRKSRPVSVKTFEDIPLEEPEVKVIPDDNQTDSGMVLASEELKTLEDRTKLSPSFGGMVPSKSRESVASEGSNQTSGYQSGYHSDDTDTTVYSSEEAELLKLIEIGVQTGSTAQILQPDSGTTLSSPPV

SEQ ID NO: 428 - protein, 1298 aa, Homo sapiens
  ref <308>: DATABASE ACCESSION NUMBER: GenBank No. NP002011
  ref <309>: DATABASE ENTRY DATE: 2004-12-18
MQRGAALCLRLWLCLGLLDGLVSDYSMTPPTLNITEESHVIDTGDSLSISCRGQHPLEWAWPGAQEAPATGDKDSEDTGVVRDCEGTDARPYCKVLLLHEVHANDTGSYVCYYKYIKARIEGTTAASSYVFVRDFEQPFINKPDTLLVNRKDAMWVPCLVSIPGLNVTLRSQSSVLWPDGQEVVWDDRRGMLVSTPLLHDALYLQCETTWGDQDFLSNPFLVHITGNELYDIQLLPRKSLELLVGEKLVLNCTVWAEFNSGVTFDWDYPGKQAERGKWVPERRSQQTHTELSSILTIHNVSQHDLGSYVCKANNGIQRFRESTEVIVHENPFISVEWLKGPILEATAGDELVKLPVKLAAYPPPEFQWYKDGKALSGRHSPHALVLKEVTEASTGTYTLALWNSAAGLRRNISLELVVNVPPQIHEKEASSPSIYSRHSRQALTCTAYGVPLPLSIQWHWRPWTPCKMFAQRSLRRRQQQDLMPQCRDWRAVTTQDAVNPIESLDTWTEFVEGKNKTVSKLVIQNANVSAMYKCVVSNKVGQDERLIYFYVTTIPDGFTIESKPSEELLEGQPVLLSCQADSYKYEHLRWYRLNLSTLHDAHGNPLLLDCKNVHLFATPLAASLEEVAPGARHATLSLSIPRVAPEHEGHYVCEVQDRRSHDKHCHKKYLSVQALEAPRLTQNLTDLLVNVSDSLEMQCLVAGAHAPSIVWYKDERLLEEKSGVDLADSNQKLSIQRVREEDAGPYLCSVCRPKGCVNSSASVAVEGSEDKGSMEIVILVGTGVIAVFFWVLLLLIFCNMRRPAHADIKTGYLSIIMDPGEVPLEEQCEYLSYDASQWEFPRERLHLGRVLGYGAFGKVVEASAFGIHKGSSCDTVAVKMLKEGATASEQRALMSELKILIHIGNHLNVVNLLGACTKPQGPLMVIVEFCKYGNLSNFLRAKRDAFSPCAEKSPEQRGRFRAMVELARLDRRRPGSSDRVLFARFSKTEGGARRASPDQEAEDLWLSPLTMEDLVCYSFQVARGMEFLASRKCIHRDLAARNILLSESDVVKICDFGLARDIYKDPDYVRKGSARLPLKWMAPESIFDKVYTTQSDVWSFGVLLWEIFSLGASPYPGVQINEEFCQRVRDGTRMRAPELATPAIRHIMLNCWSGDPKARPAFSDLVEILGDLLQGRGLQEEEEVCMAPRSSQSSEEGSFSQVSTMALHIAQADAEDSPPSLQRHSLAARYYNWVSFPGCLARGAETRGSSRMKTFEEFPMTPTTYKGSVDNQTDSGMVLASEEFEQIESRHRQESGFR

SEQ ID NO: 429 - protein, 913 aa, Homo sapiens
  VARIANT 53: Xaa = W or A
  VARIANT 55,  68: Xaa = D or A
  VARIANT 66, 175: Xaa = S or A
  VARIANT 105: Xaa = R or A
  VARIANT 106: Xaa = H or A
  VARIANT 110: Xaa = L or A
  VARIANT 112: Xaa = K or A
  VARIANT 173: Xaa = V or A
  VARIANT 174: Xaa = M or A
MGPEALSSLLLLLLVASGDADMKGHFDPAKCRYALGMQDRTIPDSDISASSSXSXSTAARHSRLEXSXGDGAWCPAGSVFPKEEEYLQVDLQRLHLVALVGTQGXXAGGXGXEFSRSYRLRYSRDGRRWMGWKDRWGQEVISGNEDPEGVVLKDLGPPMVARLVRFYPRADRXXXVCLRVELYGCLWRDGLLSYTAPVGQTMYLSEAVYLNDSTYDGHTVGGLQYGGLGQLADGVVGLDDFRKSQELRVWPGYDYVGWSNHSFSSGYVEMEFEFDRLRAFQAMQVHCNNMHTLGARLPGGVECRFRRGPAMAWEGEPMRHNLGGNLGDPRARAVSVPLGGRVARFLQCRFLFAGPWLLFSEISFISDVVNNSSPALGGTFPPAPWWPPGPPPTNFSSLELEPRGQQPVAKAEGSPTAILIGCLVAIILLLLLIIALMLWRLHWRRLLSKAERRVLEEELTVHLSVPGDTILINNRPGPREPPPYQEPRPRGNPPHSAPCVPNGSALLLSNPAYRLLLATYARPPRGPGPPTPAWAKPTNTQAYSGDYMEPEKPGAPLLPPPPQNSVPHYAEADIVTLQGVTGGNTYAVPALPPGAVGDGPPRVDFPRSRLRFKEKLGEGQFGEVHLCEVDSPQDLVSLDFPLNVRKGHPLLVAVKILRPDATKNARNDFLKEVKIMSRLKDPNIIRLLGVCVQDDPLCMITDYMENGDLNQFLSAHQLEDKAAEGAPGDGQAAQGPTISYPMLLHVAAQIASGMRYLATLNFVHRDLATRNCLVGENFTIKIADFGMSRNLYAGDYYRVQGRAVLPIRWMAWECILMGKFTTASDVWAFGVTLWEVLMLCRAQPFGSAHRRAGHRERGGVLPGPGPAVYLSRPPACPQGLYELMLRCWSRESEQRPPFSQLHRFLAEDALNTV

SEQ ID NO: 430 - protein, 855 aa, Homo sapiens
  VARIANT 550: Xaa = G or R
MILIPRMLLVLFLLLPILSSAKAQVNPAICRYPLGMSGGQIPDEDITASSQWSESTAAKYGRLDSEEGDGAWCPEIPVEPDDLKEFLQIDLHTLHFITLVGTQGRHAGGHGIEFAPMYKINYSRDGTRWISWRNRHGKQVLDGNSNPYDIFLKDLEPPIVARFVRFIPVTDHSMNVCMRVELYGCVWLDGLVSYNAPAGQQFVLPGGSIIYLNDSVYDGAVGYSMTEGLGQLTDGVSGLDDFTQTHEYHVWPGYDYVGWRNESATNGYIEIMFEFDRIRNFTTMKVHCNNMFAKGVKIFKEVQCYFRSEASEWEPNAISFPLVLDDVNPSARFVTVPLHHRMASAIKCQYHFADTWMMFSEITFQSDAAMYNNSEALPTSPMAPTTYDPMLKVDDSNTRILIGCLVAIIFILLAIIVIILWRQFWQKMLEKASRRMLDDEMTVSLSLPSDSSMFNNNRSSSPSEQGSNSTYDRIFPLRPDYQEPSRLIRKLPEFAPGEEESGCSGVVKPVQPSGPEGVPHYAEADIVNLQGVTGGNTYSVPAVTMDLLSXKDVAVEEFPRKLLTFKEKLGEGQFGEVHLCEVEGMEKFKDKDFALDVSANQPVLVAVKMLRADANKNARNDFLKEIKIMSRLKDPNIIHLLSVCITDDPLCMITEYMENGDLNQFLSRHEPPNSSSSDVRTVSYTNLKFMATQIASGMKYLSSLNFVHRDLATRNCLVGKNYTIKIADFGMSRNLYSGDYYRIQGRAVLPIRWMSWESILLGKFTTASDVWAFGVTLWETFTFCQEQPYSQLSDEQVIENTGEFFRDQGRQTYLPQPAICPDSVYKLMLSCWRRDTKNRPSFQEIHLLLLQQGDE

SEQ ID NO: 431 - protein, 976 aa, Homo sapiens
  VARIANT 160: Xaa = A or V
MERRWPLGLGLVLLLCAPLPPGARAKEVTLMDTSKAQGELGWLLDPPKDGWSEQQQILNGTPLYMYQDCPMQGRRDTDHWLRSNWIYRGEEASRVHVELQFTVRDCKSFPGGAGPLGCKETFNLLYMESDQDVGIQLRRPLFQKVTTVAADQSFTIRDLXSGSVKLNVERCSLGRLTRRGLYLAFHNPGACVALVSVRVFYQRCPETLNGLAQFPDTLPGPAGLVEVAGTCLPHARASPRPSGAPRMHCSPDGEWLVPVGRCHCEPGYEEGGSGEACVACPSGSYRMDMDTPHCLTCPQQSTAESEGATICTCESGHYRAPGEGPQVACTGPPSAPRNLSFSASGTQLSLRWEPPADTGGRQDVRYSVRCSQCQGTAQDGGPCQPCGVGVHFSPGARGLTTPAVHVNGLEPYANYTFNVEAQNGVSGLGSSGHASTSVSISMGHAESLSGLSLRLVKKEPRQLELTWAGSRPRSPGANLTYELHVLNQDEERYQMVLEPRVLLTELQPDTTYIVRVRMLTPLGPGPFSPDHEFRTSPPVSRGLTGGEIVAVIFGLLLGAALLLGILVFRSRRAQRQRQQRQRDRATDVDREDKLWLKPYVDLQAYEDPAQGALDFTRELDPAWLMVDTVIGEGEFGEVYRGTLRLPSQDCKTVAIKTLKDTSPGGQWWNFLREATIMGQFSHPHILHLEGVVTKRKPIMIITEFMENGALDAFLREREDQLVPGQLVAMLQGIASGMNYLSNHNYVHRDLAARNILVNQNLCCKVSDFGLTRLLDDFDGTYETQGGKIPIRWTAPEAIAHRIFTTASDVWSFGIVMWEVLSFGDKPYGEMSNQEVMKSIEDGYRLPPPVDCPAPLYELMKNCWAYDRARRPHFQKLQAHLEQLLANPHSLRTIANFDPRMTLRLPSLSGSDGIPYRTVSEWLESIRMKRYILHFHSAGLDTMECVLELTAEDLTQMGITLPGHQKRILCSIQGFKD

SEQ ID NO: 432 - protein, 976 aa, Homo sapiens
  VARIANT 94: Xaa = I or N
  VARIANT 96: Xaa = I or F
  VARIANT 99: Xaa = K or N
  VARIANT 350: Xaa = P or T
  VARIANT 825: Xaa = E or K
MELQAARACFALLWGCALAAAAAAQGKEVVLLDFAAAGGELGWLTHPYGKGWDLMQNIMNDMPIYMYSVCNVMSGDQDNWLRTNWVYRGEAERXFXELXFTVRDCNSFPGGASSCKETFNLYYAESDLDYGTNFQKRLFTKIDTIAPDEITVSSDFEARHVKLNVEERSVGPLTRKGFYLAFQDIGACVALLSVRVYYKKCPELLQGLAHFPETIAGSDAPSLATVAGTCVDHAVVPPGGEEPRMHCAVDGEWLVPIGQCLCQAGYEKVEDACQACSPGFFKFEASESPCLECPEHTLPSPEGATSCECEEGFFRAPQDPASMPCTRPPSAPHYLTAVGMGAKVELRWTXPQDSGGREDIVYSVTCEQCWPESGECGPCEASVRYSEPPHGLTRTSVTVSDLEPHMNYTFTVEARNGVSGLVTSRSFRTASVSINQTEPPKVRLEGRSTTSLSVSWSIPPPQQSRVWKYEVTYRKKGDSNSYNVRRTEGFSVTLDDLAPDTTYLVQVQALTQEGQGAGSKVHEFQTLSPEGSGNLAVIGGVAVGVVLLLVLAGVGFFIHRRRKNQRARQSPEDVYFSKSEQLKPLKTYVDPHTYEDPNQAVLKFTTEIHPSCVTRQKVIGAGEFGEVYKGMLKTSSGKKEVPVAIKTLKAGYTEKQRVDFLGEAGIMGQFSHHNIIRLEGVISKYKPMMIITEYMENGALDKFLREKDGEFSVLQLVGMLRGIAAGMKYLANMNYVHRDLAARNILVNSNLVCKVSDFGLSRVLEDDPEATYTTSGGKIPIRWTAPEAISYRKFTSASDVWSFGIVMWEVMTYGERPYWELSNHXVMKAINDGFRLPTPMDCPSAIYQLMMQCWQQERARRPKFADIVSILDKLIRAPDSLKTLADFDPRVSIRLPSTSGSEGVPFRTVSEWLESIKMQQYTEHFMAAGYTAIEKVVQMTNDDIKRIGVRLPGHQKRIAYSLLGLKDQVNTVGIPI

SEQ ID NO: 433 - protein, 983 aa, Homo sapiens
  VARIANT 914: Xaa = R or H
MDCQLSILLLLSCSVLDSFGELIPQPSNEVNLLDSKTIQGELGWISYPSHGWEEISGVDEHYTPIRTYQVCNVMDHSQNNWLRTNWVPRNSAQKIYVELKFTLRDCNSIPLVLGTCKETFNLYYMESDDDHGVKFREHQFTKIDTIAADESFTQMDLGDRILKLNTEIREVGPVNKKGFYLAFQDVGACVALVSVRVYFKKCPFTVKNLAMFPDTVPMDSQSLVEVRGSCVNNSKEEDPPRMYCSTEGEWLVPIGKCSCNAGYEERGFMCQACRPGFYKALDGNMKCAKCPPHSSTQEDGSMNCRCENNYFRADKDPPSMACTRPPSSPRNVISNINETSVILDWSWPLDTGGRKDVTFNIICKKCGWNIKQCEPCSPNVRFLPRQFGLTNTTVTVTDLLAHTNYTFEIDAVNGVSELSSPPRQFAAVSITTNQAAPSPVLTIKKDRTSRNSISLSWQEPEHPNGIILDYEVKYYEKQEQETSYTILRARGTNVTISSLKPDTIYVFQIRARTAAGYGTNSRKFEFETSPDSFSISGESSQVVMIAISAAVAIILLTVVIYVLIGRFCGYKSKHGADEKRLHFGNGHLKLPGLRTYVDPHTYEDPTQAVHEFAKELDATNISIDKVVGAGEFGEVCSGRLKLPSKKEISVAIKTLKVGYTEKQRRDFLGEASIMGQFDHPNIIRLEGVVTKSKPVMIVTEYMENGSLDSFLRKHDAQFTVIQLVGMLRGIASGMKYLSDMGYVHRDLAARNILINSNLVCKVSDFGLSRVLEDDPEAAYTTRGGKIPIRWTSPEAIAYRKFTSASDVWSYGIVLWEVMSYGERPYWEMSNQDVIKAVDEGYRLPPPMDCPAALYQLMLDCWQKDRNNRPKFEQIVSILDKLIRNPGSLKIITSAAARPSNLLLDQSNVDITTFXTTGDWLNGVWTAHCKEIFTGVEYSSCDTIAKISTDDMKKVGVTVVGPQKKIISSIKALETQSKNGPVPV

SEQ ID NO: 434 - protein, 998 aa, Homo sapiens
  VARIANT 138: Xaa = I or V
  VARIANT 278: Xaa = P or S
MVFQTRYPSWIILCYIWLLRFAHTGEAQAAKEVLLLDSKAQQTELEWISSPPNGWEEISGLDENYTPIRTYQVCQVMEPNQNNWLRTNWISKGNAQRIFVELKFTLRDCNSLPGVLGTCKETFNLYYYETDYDTGRNXRENLYVKIDTIAADESFTQGDLGERKMKLNTEVREIGPLSKKGFYLAFQDVGACIALVSVKVYYKKCWSIIENLAIFPDTVTGSEFSSLVEVRGTCVSSAEEEAENAPRMHCSAEGEWLVPIGKCICKAGYQQKGDTCEXCGRGFYKSSSQDLQCSRCPTHSFSDKEGSSRCECEDGYYRAPSDPPYVACTRPPSAPQNLIFNINQTTVSLEWSPPADNGGRNDVTYRILCKRCSWEQGECVPCGSNIGYMPQQTGLEDNYVTVMDLLAHANYTFEVEAVNGVSDLSRSQRLFAAVSITTGQAAPSQVSGVMKERVLQRSVELSWQEPEHPNGVITEYEIKYYEKDQRERTYSTVKTKSTSASINNLKPGTVYVFQIRAFTAAGYGNYSPRLDVATLEEATGKMFEATAVSSEQNPVIIIAVVAVAGTIILVFMVFGFIIGRRHCGYSKADQEGDEELYFHFKFPGTKTYIDPETYEDPNRAVHQFAKELDASCIKIERVIGAGEFGEVCSGRLKLPGKRDVAVAIKTLKVGYTEKQRRDFLCEASIMGQFDHPNVVHLEGVVTRGKPVMIVIEFMENGALDAFLRKHDGQFTVIQLVGMLRGIAAGMRYLADMGYVHRDLAARNILVNSNLVCKVSDFGLSRVIEDDPEAVYTTTGGKIPVRWTAPEAIQYRKFTSASDVWSYGIVMWEVMSYGERPYWDMSNQDVIKAIEEGYRLPAPMDCPAGLHQLMLDCWQKERAERPKFEQIVGILDKMIRNPNSLKTPLGTCSRPISPLLDQNTPDFTTFCSVGEWLQAIKMERYKDNFTAAGYNSLESVARMTIEDVMSLGITLVGHQKKIMSSIQTMRAQMLHLHGTGIQV

SEQ ID NO: 435 - protein, 1005 aa, Homo sapiens
  VARIANT 301: Xaa = A or V
  VARIANT 444: Xaa = V or M
  VARIANT 612: Xaa = E or Q
MAPARGRLPPALWVVTAAAAAATCVSAARGEVNLLDTSTIHGDWGWLTYPAHGWDSINEVDESFQPIHTYQVCNVMSPNQNNWLRTSWVPRDGARRVYAEIKFTLRDCNSMPGVLGTCKETFNLYYLESDRDLGASTQESQFLKIDTIAADESFTGADLGVRRLKLNTEVRSVGPLSKRGFYLAFQDIGACLAILSLRIYYKKCPAMVRNLAAFSEAVTGADSSSLVEVRGQCVRHSEERDTPKMYCSAEGEWLVPIGKCVCSAGYEERRDACVACELGFYKSAPGDQLCARCPPHSHSAXPAAQACHCDLSYYRAALDPPSSACTRPPSAPVNLISSVNGTSVTLEWAPPLDPGGRSDITYNAVCRRCPWALSRCEACGSGTRFVPQQTSLVQASLLVANLLAHMNYSFWIEAVNGVSDLSPEPRRAAVVNITTNQAAPSQVXVIRQERAGQTSVSLLWQEPEQPNGIILEYEIKYYEKDKEMQSYSTLKAVTTRATVSGLKPGTRYVFQVRARTSAGCGRFSQAMEVETGKPRPRYDTRTIVWICLTLITGLVVLLLLLICKKRHCGYSKAFQDSDEEKMHYQNGQAPPPVFLPLHHPPGKLPEPQFYAXPHTYEEPGRAGRSFTREIEASRIHIEKIIGSGDSGEVCYGRLRVPGQRDVPVAIKALKAGYTERQRRDFLSEASIMGQFDHPNIIRLEGVVTRGRLAMIVTEYMENGSLDTFLRTHDGQFTIMQLVGMLRGVGAGMRYLSDLGYVHRDLAARNVLVDSNLVCKVSDFGLSRVLEDDPDAAYTTTGGKIPIRWTAPEAIAFRTFSSASDVWSFGVVMWEVLAYGERPYWNMTNRDVISSVEEGYRLPAPMGCPHALHQLMLDCWHKDRAQRPRFSQIVSVLDALIRSPESLRATATVSRCPPPAFVRSCFDLRGGSGGGGGLTVGDWLDSIRMGRYRDHFAAGGYSSLGMVLRMNAQDVRALGITLMGHQKKILGSIQTMRAQLTSTQGPRRHL

SEQ ID NO: 436 - protein, 984 aa, Homo sapiens
  VARIANT 87: Xaa = T or S
  VARIANT 152, 367: Xaa = G or R
  VARIANT 274: Xaa = T or R
  VARIANT 485: Xaa = R or S
  VARIANT 813: Xaa = V or I
  VARIANT 847: Xaa = M or T
  VARIANT 973: Xaa = R or W
MALDYLLLLLLASAVAAMEETLMDTRTATAELGWTANPASGWEEVSGYDENLNTIRTYQVCNVFEPNQNNWLLTTFINRRGAHRIYXEMRFTVRDCSSLPNVPGSCKETFNLYYYETDSVIATKKSAFWSEAPYLKVDTIAADESFSQVDFXGRLMKVNTEVRSFGPLTRNGFYLAFQDYGACMSLLSVRVFFKKCPSIVQNFAVFPETMTGAESTSLVIARGTCIPNAEEVDVPIKLYCNGDGEWMVPIGRCTCKPGYEPENSVACKACPAGXFKASQEAEGCSHCPSNSRSPAEASPICTCRTGYYRADFDPPEVACTSVPSGPRNVISIVNETSIILEWHPPRETGGRDDVTYNIICKKCRADXRSCSRCDDNVEFVPRQLGLTECRVSISSLWAHTPYTFDIQAINGVSSKSPFPPQHVSVNITTNQAAPSTVPIMHQVSATMRSITLSWPQPEQPNGIILDYEIRYYEKEHNEFNSSMAXSQTNTARIDGLRPGMVYVVQVRARTVAGYGKFSGKMCFQTLTDDDYKSELREQLPLIAGSAAAGVVFVVSLVAISIVCSRKRAYSKEAVYSDKLQHYSTGRGSPGMKIYIDPFTYEDPNEAVREFAKEIDVSFVKIEEVIGAGEFGEVYKGRLKLPGKREIYVAIKTLKAGYSEKQRRDFLSEASIMGQFDHPNIIRLEGVVTKSRPVMIITEFMENGALDSFLRQNDGQFTVIQLVGMLRGIAAGMKYLAEMNYVHRDLAARNILVNSNLVCKVSDFGLSRYLQDDTSDPTYTSSLGGKIPVRWTAPEAIAYRKFTSASDVWSYGIXMWEVMSFGERPYWDMSNQDVINAIEQDYRLPPPXDCPAALHQLMLDCWQKDRNSRPRFAEIVNTLDKMIRNPASLKTVATITAVPSQPLLDRSIPDFTAFTTVDDWLSAIKMVQYRDSFLTAGFTSLQLVTQMTSEDLLRIGITLAGHQKKILNSIHSMXVQISQSPTAMA

SEQ ID NO: 437 - protein, 1055 aa, Homo sapiens
  VARIANT 923: Xaa = E or K
MALRRLGAALLLLPLLAAVEETLMDSTTATAELGWMVHPPSGWEEVSGYDENMNTIRTYQVCNVFESSQNNWLRTKFIRRRGAHRIHVEMKFSVRDCSSIPSVPGSCKETFNLYYYEADFDSATKTFPNWMENPWVKVDTIAADESFSQVDLGGRVMKINTEVRSFGPVSRSGFYLAFQDYGGCMSLIAVRVFYRKCPRIIQNGAIFQETLSGAESTSLVAARGSCIANAEEVDVPIKLYCNGDGEWLVPIGRCMCKAGFEAVENGTVCRGCPSGTFKANQGDEACTHCPINSRTTSEGATNCVCRNGYYRADLDPLDMPCTTIPSAPQAVISSVNETSLMLEWTPPRDSGGREDLVYNIICKSCGSGRGACTRCGDNVQYAPRQLGLTEPRIYISDLLAHTQYTFEIQAVNGVTDQSPFSPQFASVNITTNQAAPSAVSIMHQVSRTVDSITLSWSQPDQPNGVILDYELQYYEKELSEYNATAIKSPTNTVTVQGLKAGAIYVFQVRARTVAGYGRYSGKMYFQTMTEAEYQTSIQEKLPLIIGSSAAGLVFLIAVVVIAIVCNRRGFERADSEYTDKLQHYTSGHMTPGMKIYIDPFTYEDPNEAVREFAKEIDISCVKIEQVIGAGEFGEVCSGHLKLPGKREIFVAIKTLKSGYTEKQRRDFLSEASIMGQFDHPNVIHLEGVVTKSTPVMIITEFMENGSLDSFLRQNDGQFTVIQLVGMLRGIAAGMKYLADMNYVHRDLAARNILVNSNLVCKVSDFGLSRFLEDDTSDPTYTSALGGKIPIRWTAPEAIQYRKFTSASDVWSYGIVMWEVMSYGERPYWDMTNQDVINAIEQDYRLPPPMDCPSALHQLMLDCWQKDRNHRPKFGQIVNTLDKMIRNPNSLKAMAPLSSGINLPLLDRTIPDYTSFNTVDEWLXAIKMGQYKESFANAGFTSFDVVSQMMMEDILRVGVTLAGHQKKILNSIQVMRAQMNQIQSVEGQPLARRPRATGRTKRCQPRDVTKKTCNSNDGKKKGMGKKKTDPGRGREIQGIFFKEDSHKESNDCSCGG

SEQ ID NO: 438 - protein, 998 aa, Homo sapiens
  VARIANT 981: Xaa = S or I
MARARPPPPPSPPPGLLPLLPPLLLLPLLLLPAGCRALEETLMDTKWVTSELAWTSHPESGWEEVSGYDEAMNPIRTYQVCNVRESSQNNWLRTGFIWRRDVQRVYVELKFTVRDCNSIPNIPGSCKETFNLFYYEADSDVASASSPFWMENPYVKVDTIAPDESFSRLDAGRVNTKVRSFGPLSKAGFYLAFQDQGACMSLISVRAFYKKCASTTAGFALFPETLTGAEPTSLVIAPGTCIPNAVEVSVPLKLYCNGDGEWMVPVGACTCATGHEPAAKESQCRPCPPGSYKAKQGEGPCLPCPPNSRTTSPAASICTCHNNFYRADSDSADSACTTVPSPPRGVISNVNETSLILEWSEPRDLGGRDDLLYNVICKKCHGAGGASACSRCDDNVEFVPRQLGLTERRVHISHLLAHTRYTFEVQAVNGVSGKSPLPPRYAAVNITTNQAAPSEVPTLRLHSSSGSSLTLSWAPPERPNGVILDYEMKYFEKSEGIASTVTSQMNSVQLDGLRPDARYVVQVRARTVAGYGQYSRPAEFETTSERGSGAQQLQEQLPLIVGSATAGLVFVVAVVVIAIVCLRKQRHGSDSEYTEKLQQYIAPGMKVYIDPFTYEDPNEAVREFAKEIDVSCVKIEEVIGAGEFGEVCRGRLKQPGRREVFVAIKTLKVGYTERQRRDFLSEASIMGQFDHPNIIRLEGVVTKSRPVMILTEFMENCALDSFLRLNDGQFTVIQLVGMLRGIAAGMKYLSEMNYVHRDLAARNILVNSNLVCKVSDFGLSRFLEDDPSDPTYTSSLGGKIPIRWTAPEAIAYRKFTSASDVWSYGIVMWEVMSYGERPYWDMSNQDVINAVEQDYRLPPPMDCPTALHQLMLDCWVRDRNLRPKFSQIVNTLDKLIRNAASLKVIASAQSGMSQPLLDRTVPDYTTFTTVGDWLDAIKMGRYKESFVSAGFASFDLVAQMTAEDLLRIGVTLAGHQKKILXSIQDMRLQMNQTLPVQV

SEQ ID NO: 439 - protein, 987 aa, Homo sapiens
  VARIANT 463: Xaa = A or D
  VARIANT 471: Xaa = Y or D
  VARIANT 926: Xaa = E or D
MELRVLLCWASLAAALEETLLNTKLETADLKWVTFPQVDGQWEELSGLDEEQHSVRTYEVCDVQRAPGQAHWLRTGWVPRRGAVHVYATLRFTMLECLSLPRAGRSCKETFTVFYYESDADTATALTPAWMENPYIKVDTVAAEHLTRKRPGAEATGKVNVKTLRLGPLSKAGFYLAFQDQGACMALLSLHLFYKKCAQLTVNLTRFPETVPRELVVPVAGSCVVDAVPAPGPSPSLYCREDGQWAEQPVTGCSCAPGFEAAEGNTKCRACAQGTFKPLSGEGSCQPCPANSHSNTIGSAVCQCRVGYFRARTDPRGAPCTTPPSAPRSVVSRLNGSSLHLEWSAPLESGGREDLTYALRCRECRPGGSCAPCGGDLTFDPGPRDLVEPWVVVRGLRPDFTYTFEVTALNGVSSLATGPVPFEPVNVTTDREVPPAVSDIRVTRSSPSSLSLAWAVPRAPSGXVLDYEVKXHEKGAEGPSSVRFLKTSENRAELRGLKRGASYLVQVRARSEAGYGPFGQEHHSQTQLDESEGWREQLALIAGTAVVGVVLVLVVIVVAVLCLRKQSNGREAEYSDKHGQYLIGHGTKVYIDPFTYEDPNEAVREFAKEIDVSYVKIEEVIGAGEFGEVCRGRLKAPGKKESCVAIKTLKGGYTERQRREFLSEASIMGQFEHPNIIRLEGVVTNSMPVMILTEFMENGALDSFLRLNDGQFTVIQLVGMLRGIASGMRYLAEMSYVHRDLAARNILVNSNLVCKVSDFGLSRFLEENSSDPTYTSSLGGKIPIRWTAPEAIAFRKFTSASDAWSYGIVMWEVMSFGERPYWDMSNQDVINAIEQDYRLPPPPDCPTSLHQLMLDCWQKDRNARPRFPQVVSALDKMIRNPASLKIVARENGGASHPLLDQRQPHYSAFGSVGEWLRAIKMGRYEXSFAAAGFGSFELVSQISAEDLLRIGVTLAGHQKKILASVQHMKSQAKPGTPGGTGGPAPQY

SEQ ID NO: 440 - protein, 1006 aa, Homo sapiens
  VARIANT 107: Xaa = G or S
  VARIANT 267: Xaa = P or R
  VARIANT 309: Xaa = S or A
  VARIANT 484: Xaa = R or Q
MVCSLWVLLLVSSVLALEEVLLDTTGETSEIGWLTYPPGGWDEVSVLDDQRRLTRTFEACHVAGAPPGTGQDNWLQTHFVERRGAQRAHIRLHFSVRACSSLGVSGXTCRETFTLYYRQAEEPDSPDSVSSWHLKRWTKVDTIAADESFPSSSSSSSSSSSAAWAVGPHGAGQRAGLQLNVKERSFGPLTQRGFYVAFQDTGACLALVAVRLFSYTCPAVLRSFASFPETQASGAGGASLVAAVGTCVAHAEPEEDGVGGQAGGSPXRLHCNGEGKWMVAVGGCRCQPGYQPARGDKACQACPRGLYKXSAGNAPCSPCPARSHAPNPAAPVCPCLEGFYRASSDPPEAPCTGPPSAPQELWFEVQGSALMLHWRLPRELGGRGDLLFNVVCKECEGRQEPASGGGGTCHRCRDEVHFDPRQRGLTESRVLVGGLRAHVPYILEVQAVNGVSELSPDPPQAAAINVSTSHEVPSAVPVVHQVSXASNSITVSWPQPDQTNGNILDYQLRYYDQAEDESHSFTLTSETNTATVTQLSPGHIYGFQVRARTAAGHGPYGGKVYFQTLPQGELSSQLPERLSLVIGSILGALAFLLLAAITVLAVVFQRKRRGTGYTEQLQQYSSPGLGVKYYIDPSTYEDPCQAIRELAREVDPAYIKIEEVIGTGSFGEVRQGRLQPRGRREQTVAIQALWAGGAESLQMTFLGRAAVLGQFQHPNILRLEGVVTKSRPLMVLTEFMELGPLDSFLRQREGQFSSLQLVAMQRGVAAAMQYLSSFAFVHRSLSAHSVLVNSHLVCKVARLGHSPQGPSCLLRWAAPEVIAHGKHTTSSDVWSFGILMWEVMSYGERPYWDMSEQEVLNAIEQEFRLPPPPGCPPGLHLLMLDTWQKDRARRPHFDQLVAAFDKMIRKPDTLQAGGDPGERPSQALLTPVALDFPCLDSPQAWLSAIGLECYQDNFSKFGLCTFSDVAQLSLEDLPALGITLAGHQKKLLHHIQLLQQHLRQQGSVEV

SEQ ID NO: 441 - protein, 1210 aa, Homo sapiens
  VARIANT 521: Xaa = R or K
MRPSGTAGAALLALLAALCPASRALEEKKVCQGTSNKLTQLGTFEDHFLSLQRMFNNCEVVLGNLEITYVQRNYDLSFLKTIQEVAGYVLIALNTVERIPLENLQIIRGNMYYENSYALAVLSNYDANKTGLKELPMRNLQEILHGAVRFSNNPALCNVESIQWRDIVSSDFLSNMSMDFQNHLGSCQKCDPSCPNGSCWGAGEENCQKLTKIICAQQCSGRCRGKSPSDCCHNQCAAGCTGPRESDCLVCRKFRDEATCKDTCPPLMLYNPTTYQMDVNPEGKYSFGATCVKKCPRNYVVTDHGSCVRACGADSYEMEEDGVRKCKKCEGPCRKVCNGIGIGEFKDSLSINATNIKHFKNCTSISGDLHILPVAFRGDSFTHTPPLDPQELDILKTVKEITGFLLIQAWPENRTDLHAFENLEIIRGRTKQHGQFSLAVVSLNITSLGLRSLKEISDGDVIISGNKNLCYANTINWKKLFGTSGQKTKIISNRGENSCKATGQVCHALCSPEGCWGPEPXDCVSCRNVSRGRECVDKCNLLEGEPREFVENSECIQCHPECLPQAMNITCTGRGPDNCIQCAHYIDGPHCVKTCPAGVMGENNTLVWKYADAGHVCHLCHPNCTYGCTGPGLEGCPTNGPKIPSIATGMVGALLLLLVVALGIGLFMRRRHIVRKRTLRRLLQERELVEPLTPSGEAPNQALLRILKETEFKKIKVLGSGAFGTVYKGLWIPEGEKVKIPVAIKELREATSPKANKEILDEAYVMASVDNPHVCRLLGICLTSTVQLITQLMPFGCLLDYVREHKDNIGSQYLLNWCVQIAKGMNYLEDRRLVHRDLAARNVLVKTPQHVKITDFGLAKLLGAEEKEYHAEGGKVPIKWMALESILHRIYTHQSDVWSYGVTVWELMTFGSKPYDGIPASEISSILEKGERLPQPPICTIDVYMIMVKCWMIDADSRPKFRELIIEFSKMARDPQRYLVIQGDERMHLPSPTDSNFYRALMDEEDMDDVVDADEYLIPQQGFFSSPSTSRTPLLSSLSATSNNSTVACIDRNGLQSCPIKEDSFLQRYSSDPTGALTEDSIDDTFLPVPEYINQSVPKRPAGSVQNPVYHNQPLNPAPSRDPHYQDPHSTAVGNPEYLNTVQPTCVNSTFDSPAHWAQKGSHQISLDNPDYQQDFFPKEAKPNGIFKGSTAENAEYLRVAPQSSEFIGA

SEQ ID NO: 442 - protein, 1255 aa, Homo sapiens
  VARIANT 452: Xaa = W or C
  VARIANT 654: Xaa = I or V
  VARIANT 655: Xaa = I or V
  VARIANT 1170: Xaa = P or A
MELAALCRWGLLLALLPPGAASTQVCTGTDMKLRLPASPETHLDMLRHLYQGCQVVQGNLELTYLPTNASLSFLQDIQEVQGYVLIAHNQVRQVPLQRLRIVRGTQLFEDNYALAVLDNGDPLNNTTPVTGASPGGLRELQLRSLTEILKGGVLIQRNPQLCYQDTILWKDIFHKNNQLALTLIDTNRSRACHPCSPMCKGSRCWGESSEDCQSLTRTVCAGGCARCKGPLPTDCCHEQCAAGCTGPKHSDCLACLHFNHSGICELHCPALVTYNTDTFESMPNPEGRYTFGASCVTACPYNYLSTDVGSCTLVCPLHNQEVTAEDGTQRCEKCSKPCARVCYGLGMEHLREVRAVTSANIQEFAGCKKIFGSLAFLPESFDGDPASNTAPLQPEQLQVFETLEEITGYLYISAWPDSLPDLSVFQNLQVIRGRILHNGAYSLTLQGLGISXLGLRSLRELGSGLALIHHNTHLCFVHTVPWDQLFRNPHQALLHTANRPEDECVGEGLACHQLCARGHCWGPGPTQCVNCSQFLRGQECVEECRVLQGLPREYVNARHCLPCHPECQPQNGSVTCFGPEADQCVACAHYKDPPFCVARCPSGVKPDLSYMPIWKFPDEEGACQPCPINCTHSCVDLDDKGCPAEQRASPLTSXXSAVVGILLVVVLGVVFGILIKRRQQKIRKYTMRRLLQETELVEPLTPSGAMPNQAQMRILKETELRKVKVLGSGAFGTVYKGIWIPDGENVKIPVAIKVLRENTSPKANKEILDEAYVMAGVGSPYVSRLLGICLTSTVQLVTQLMPYGCLLDHVRENRGRLGSQDLLNWCMQIAKGMSYLEDVRLVHRDLAARNVLVKSPNHVKITDFGLARLLDIDETEYHADGGKVPIKWMALESILRRRFTHQSDVWSYGVTVWELMTFGAKPYDGIPAREIPDLLEKGERLPQPPICTIDVYMIMVKCWMIDSECRPRFRELVSEFSRMARDPQRFVVIQNEDLGPASPLDSTFYRSLLEDDDMGDLVDAEEYLVPQQGFFCPDPAPGAGGMVHHRHRSSSTRSGGGDLTLGLEPSEEEAPRSPLAPSEGAGSDVFDGDLGMGAAKGLQSLPTHDPSPLQRYSEDPTVPLPSETDGYVAPLTCSPQPEYVNQPDVRPQPPSPREGPLPAARPAGATLERXKTLSPGKNGVVKDVFAFGGAVENPEYLTPQGGAAPQPHPPPAFSPAFDNLYYWDQDPPERGAPPSTFKGTPTAENPEYLGLDVPV

SEQ ID NO: 443 - protein, 820 aa, Homo sapiens
  VARIANT 22: Xaa = R or S
  VARIANT 97, 198: Xaa = G or D
  VARIANT 99, 275: Xaa = Y or C
  VARIANT 165: Xaa = A or S
  VARIANT 190: Xaa = K or E
  VARIANT 192: Xaa = S or G
  VARIANT 250: Xaa = P or R
  VARIANT 605: Xaa = V or M
  VARIANT 664: Xaa = W or R
  VARIANT 717: Xaa = M or R
  VARIANT 770: Xaa = P or S
  VARIANT 816: Xaa = G or R
  VARIANT 820: Xaa = R or C
MWSWKCLLFWAVLVTATLCTAXPSPTLPEQAQPWGAPVEVESFLVHPGDLLQLRCRLRDDVQSINWLRDGVQLAESNRTRITGEEVEVQDSVPADSXLXACVTSSPSGSDTTYFSVNVSDALPSSEDDDDDDDSSSEEKETDNTKPNPVAPYWTSPEKMEKKLHXVPAAKTVKFKCPSSGTPNPTLRWLXNXKEFKPXHRIGGYKVRYATWSIIMDSVVPSDKGNYTCIVENEYGSINHTYQLDVVERSXHRPILQAGLPANKTVALGSNVEFMXKVYSDPQPHIQWLKHIEVNGSKIGPDNLPYVQILKTAGVNTTDKEMEVLHLRNVSFEDAGEYTCLAGNSIGLSHHSAWLTVLEALEERPAVMTSPLYLEIIIYCTGAFLISCMVGSVIVYKMKSGTKKSDFHSQMAVHKLAKSIPLRRQVTVSADSSASMNSGVLLVRPSRLSSSGTPMLAGVSEYELPEDPRWELPRDRLVLGKPLGEGCFGQVVLAEAIGLDKDKPNRVTKVAVKMLKSDATEKDLSDLISEMEMMKMIGKHKNIINLLGACTQDGPLYVIVEYASKGNLREYLQARRPPGLEYCYNPSHNPEEQLSSKDLVSCAYQXARGMEYLASKKCIHRDLAARNVLVTEDNVMKIADFGLARDIHHIDYYKKTTNGRLPVKXMAPEALFDRIYTHQSDVWSFGVLLWEIFTLGGSPYPGVPVEELFKLLKEGHRXDKPSNCTNELYMMMRDCWHAVPSQRPTFKQLVEDLDRIVALTSNQEYLDLSMXLDQYSPSFPDTRSSTCSSGEDSVFSHEPLPEEPCLPRHPAQLANGXLKRX

SEQ ID NO: 444 - protein, 821 aa, Homo sapiens
  VARIANT 6: Xaa = R or P
  VARIANT 20: Xaa = W or C
  VARIANT 31: Xaa = T or I
  VARIANT 105: Xaa = Y or C
  VARIANT 152, 338, 384, 678: Xaa = R or G
  VARIANT 162, 186: Xaa = M or T
  VARIANT 172: Xaa = A or F
  VARIANT 252: Xaa = S or W or L
  VARIANT 253: Xaa = P or S or F
  VARIANT 267: Xaa = S or P
  VARIANT 276: Xaa = F or V
  VARIANT 278: Xaa = C or F
  VARIANT 281: Xaa = Y or C
  VARIANT 289: Xaa = Q or P
  VARIANT 315: Xaa = A or S
  VARIANT 340: Xaa = Y or H
  VARIANT 341: Xaa = T or P
  VARIANT 342: Xaa = C or R or Y or S or F or W
  VARIANT 344: Xaa = A or P or G
  VARIANT 347, 351, 372: Xaa = S or C
  VARIANT 443: Xaa = P or A
  VARIANT 549: Xaa = N or H
  VARIANT 565: Xaa = E or G
  VARIANT 641: Xaa = K or R
  VARIANT 659: Xaa = K or N
  VARIANT 663: Xaa = G or E
MVSWGXFICLVVVTMATLSLARPSFSLVEDXTLEPEEPPTKYQISQPEVYVAAPGESLEVRCLLKDAAVISWTKDGVHLGPNNRTVLIGEYLQIKGATPRDSGLXACTASRTVDSETWYFMVNVTDAISSGDDEDDTDGAEDFVSENSNNKXAPYWTNTEKXEKRLHAVPAXNTVKFRCPAGGNPXPTMRWLKNGKEFKQEHRIGGYKVRNQHWSLIMESVVPSDKGNYTCVVENEYGSINHTYHLDVVERXXHRPILQAGLPANAXTVVGGDVEXVXKVXSDAQPHIXXIKHVEKNGSKYGPDGLPYLKVLKAXGVNTTDKEIEVLYIRNVTFEDAXEXXXLXGNXIGIXFHSAWLTVLPAPGREKEITAXPDXLEIAIYCIXVFLIACMVVTVILCRMKNTTKKPDFSSQPAVHKLTKRIPLRRQVTVSAESSSSMNSNTXLVRITTRLSSTADTPMLAGVSEYELPEDPKWEFPRDKLTLGKPLGEGCFGQVVMAEAVGIDKDKPKEAVTVAVKMLKDDATEKDLSDLVSEMEMMKMIGKHKNIIXLLGACTQDGPLYVIVXYASKGNLREYLRARRPPGMEYSYDINRVPEEQMTFKDLVSCTYQLARGMEYLASQKCIHRDLAARNVLVTENNVMXIADFGLARDINNIDYYKXTTNXRLPVKWMAPEALFDXVYTHQSDVWSFGVLMWEIFTLGGSPYPGIPVEELFKLLKEGHRMDKPANCTNELYMMMRDCWHAVPSQRPTFKQLVEDLDRILTLTTNEEYLDLSQPLEQYSPSYPDTRSSCSSGDDSVFSPDPMPYEPCLPQYPHINGSVKT

SEQ ID NO: 445 - protein, 806 aa, Homo sapiens
  VARIANT 65: Xaa = G or R
  VARIANT 250: Xaa = P or R
  VARIANT 383: Xaa = F or C
MGAPACALALCVAVAIVAGASSESLGTEQRVVGRAAEVPGPEPGQQEQLVFGSGDAVELSCPPPXGGPMGPTVWVKDGTGLVPSERVLVGPQRLQVLNASHEDSGAYSCRQRLTQRVLCHFSVRVTDAPSSGDDEDGEDEAEDTGVDTGAPYWTRPERMDKKLLAVPAANTVRFRCPAAGNPTPSISWLKNGREFRGEHRIGGIKLRHQQWSLVMESVVPSDRGNYTCVVENKFGSIRQTYTLDVLERSXHRPILQAGLPANQTAVLGSDVEFHCKVYSDAQPHIQWLKHVEVNGSKVGPDGTPYVTVLKTAGANTTDKELEVLSLHNVTFEDAGEYTCLAGNSIGFSHHSAWLVVLPAEEELVEADEAGSVYAGILSYGVGXFLFILVVAAVTLCRLRSPPKKGLGSPTVHKISRFPLKRQVSLESNASMSSNTPLVRIARLSSGEGPTLANVSELELPADPKWELSRARLTLGKPLGEGCFGQVVMAEAIGIDKDRAAKPVTVAVKMLKDDATDKDLSDLVSEMEMMKMIGKHKNIINLLGACTQGGPLYVLVEYAAKGNLREFLRARRPPGLDYSFDTCKPPEEQLTFKDLVSCAYQVARGMEYLASQKCIHRDLAARNVLVTEDNVMKIADFGLARDVHNLDYYKKTTNGRLPVKWMAPEALFDRVYTHQSDVWSFGVLLWEIFTLGGSPYPGIPVEELFKLLKEGHRMDKPANCTHDLYMIMRECWHAAPSQRPTFKQLVEDLDRVLTVTSTDEYLDLSAPFEQYSPGGQDTPSSSSSGDDSVFAHDLLPPAPPSSGGSRT

SEQ ID NO: 446 - protein, 802 aa, Homo sapiens
  VARIANT 10: Xaa = V or I
  VARIANT 136: Xaa = P or L
  VARIANT 275: Xaa = S or R
  VARIANT 297: Xaa = D or V
  VARIANT 388: Xaa = G or R
  VARIANT 616: Xaa = R or L
MRLLLALLGXLLSVPGPPVLSLEASEEVELEPCLAPSLEQQEQELTVALGQPVRLCCGRAERGGHWYKEGSRLAPAGRVRGWRGRLEIASFLPEDAGRYLCLARGSMIVLQNLTLITGDSLTSSNDDEDPKSHRDXSNRHSYPQQAPYWTHPQRMEKKLHAVPAGNTVKFRCPAAGNPTPTIRWLKDGQAFHGENRIGGIRLRHQHWSLVMESVVPSDRGTYTCLVENAVGSIRYNYLLDVLERSPHRPILQAGLPANTTAVVGSDVELLCKVYXDAQPHIQWLKHIVINGSSFGAXGFPYVQVLKTADINSSEVEVLYLRNVSAEDAGEYTCLAGNSIGLSYQSAWLTVLPEEDPTWTAAAPEARYTDIILYASGSLALAVLLLLAXLYRGQALHGRHPRPPATVQKLSRFPLARQFSLESGSSGKSSSSLVRGVRLSSSGPALLAGLVSLDLPLDPLWEFPRDRLVLGKPLGEGCFGQVVRAEAFGMDPARPDQASTVAVKMLKDNASDKDLADLVSEMEVMKLIGRHKNIINLLGVCTQEGPLYVIVECAAKGNLREFLRARRPPGPDLSPDGPRSSEGPLSFPVLVSCAYQVARGMQYLESRKCIHRDLAAXNVLVTEDNVMKIADFGLARGVHHIDYYKKTSNGRLPVKWMAPEALFDRVYTHQSDVWSFGILLWEIFTLGGSPYPGIPVEELFSLLREGHRMDRPPHCPPELYGLMRECWHAAPSQRPTFKQLVEALDKVLLAVSEEYLDLRLTFGPYSPSGGDASSTCSSSDSVFSHDPLPLGSSSFPFGSGVQT

SEQ ID NO: 447 - protein, 1390 aa, Homo sapiens
  VARIANT 37, 145, 158, 237: Xaa = V or A
  VARIANT 39, 1250: Xaa = M or T
  VARIANT 42: Xaa = Q or R
  VARIANT 113, 508: Xaa = K or R
  VARIANT 114, 382: Xaa = D or N
  VARIANT 148, 476, 1094: Xaa = H or R
  VARIANT 151: Xaa = T or P
  VARIANT 168: Xaa = E or D
  VARIANT 193: Xaa = I or T
  VARIANT 216: Xaa = V or L
  VARIANT 276, 511, 729: Xaa = T or A
  VARIANT 314: Xaa = F or L
  VARIANT 337: Xaa = L or P
  VARIANT 340: Xaa = D or V
  VARIANT 400: Xaa = R or G
  VARIANT 481: Xaa = L or M
  VARIANT 500: Xaa = D or G
  VARIANT 501, 542: Xaa = Y or H
  VARIANT 622: Xaa = L or S
  VARIANT 720: Xaa = F or S
  VARIANT 1100: Xaa = N or Y
  VARIANT 1230: Xaa = C or Y
  VARIANT 1235: Xaa = Y or D
MKAPAVLAPGILVLLFTLVQRSNGECKEALAKSEMNXNXKYXLPNFTAETPIQNVILHEHHIFLGATNYIYVLNEEDLQKVAEYKTGPVLEHPDCFPCQDCSSKANLSGGVWXXNINMALVVDTYYDDQLISCGSVNRGTCQRHXFPXNHXADIQSEXHCIFSPQIEXPSQCPDCVVSALGAKVLSSVKDRFXNFFVGNTINSSYFPDHPLHSISXRRLKETKDGFMFLTDQSYIDXLPEFRDSYPIKYVHAFESNNFIYFLTVQRETLDAQTFHXRIIRFCSINSGLHSYMEMPLECILTEKRKKRSTKKEVXNILQAAYVSKPGAQLARQIGASXNDXILFGVFAQSKPDSAEPMDRSAMCAFPIKYVNDFFNKIVNKNXVRCLQHFYGPNHEHCFNXTLLRNSSGCEARRDEYRTEFTTALQRVDLFMGQFSEVLLTSISTFIKGDLTIANLGTSEGRFMQVVVSRSGPSTPXVNFLXDSHPVSPEVIVEHTLNQNXXTLVITGXKIXKIPLNGLGCRHFQSCSQCLSAPPFVQCGWCXDKCVRSEECLSGTWTQQICLPAIYKVFPNSAPLEGGTRLTICGWDFGFRRNNKFDLKKTRVLLGNESCTLTLSESTMNTXKCTVGPAMNKHFNMSIIISNGHGTTQYSTFSYVDPVITSISPKYGPMAGGTLLTLTGNYLNSGNSRHISIGGKTCTLKSVSNSILECYTPAQTISTEXAVKLKIDLXNRETSIFSYREDPIVYEIHPTKSFISGGSTITGVGKNLNSVSVPRMVINVHEAGRNFTVACQHRSNSEIICCXTPSLQQLNLQLPLKTKAFFMLDGILSKYFDLIYVHNPVFKPFEKPVMISMGNENVLEIKGNDIDPEAVKGEVLKVGNKSCENIHLHSEAVLCTVPNDLLKLNSELNIEWKQAISSTVLGKVIVQPDQNFTGLIAGVVSISTALLLLLGFFLWLKKRKQIKDLGSELVRYDARVHTPHLDRLVSARSVSPTTEMVSNESVDYRATFPEDQFPNSSQNGSCRQVQYPLTDMSPILTSGDSDISSPLLQNTVHIDLSALNPELVQAVQHVVIGPSSLIVHFNEVIGRGHFGCVYXGTLLDXDGKKIHCAVKSLNRITDIGEVSQFLTEGIIMKDFSHPNVLSLLGICLRSEGSPLVVLPYMKHGDLRNFIRNETHNPTVKDLIGFGLQVAKGMKYLASKKFVHRDLAARNCMLDEKFTVKVADFGLARDMXDKEYXSVHNKTGAKLPVKWXALESLQTQKFTTKSDVWSFGVLLWELMTRGAPPYPDVNTFDITVYLLQGRRLLQPEYCPDPLYEVMLKCWHPKAEMRPSFSELVSRISAIFSTFIGEHYVHVNATYVNVKCVAPYPSLLSSEDNADDEVDTRPASFWETS

SEQ ID NO: 448 - protein, 1400 aa, Homo sapiens
  VARIANT 113, 1195: Xaa = G or S
  VARIANT 209: Xaa = G or A
  VARIANT 322, 523: Xaa = Q or R
  VARIANT 440: Xaa = N or S
  VARIANT 946: Xaa = V or M
  VARIANT 1232: Xaa = R or G or D or V
  VARIANT 1254: Xaa = M or T
  VARIANT 1335: Xaa = R or G
MELLPPLPQSFLLLLLLPAKPAAGEDWQCPRTPYAASRDFDVKYVVPSFSAGGLVQAMVTYEGDRNESAVFVAIRNRLHVLGPDLKSVQSLATGPAGDPGCQTCAACGPGPHXPPGDTDTKVLVLDPALPALVSCGSSLQGRCFLHDLEPQGTAVHLAAPACLFSAHHNRPDDCPDCVASPLGTRVTVVEQGQASYFYVASSLDAAVAXSFSPRSVSIRRLKADASGFAPGFVALSVLPKHLVSYSIEYVHSFHTGAFVYFLTVQPASVTDDPSALHTRLARLSATEPELGDYRELVLDCRFAPKRRRRGAPEGGQPYPVLXVAHSAPVGAQLATELSIAEGQEVLFGVFVTGKDGGPGVGPNSVVCAFPIDLLDTLIDEGVERCCESPVHPGLRRGLDFFQSPSFCPNPPGLEALSPNTSCRHFPLLVSSSFSRVDLFXGLLGPVQVTALYVTRLDNVTVAHMGTMDGRILQVELVRSLNYLLYVSNFSLGDSGQPVQRDVSRLGDHLLFASGDQVFQVPIXGPGCRHFLTCGRCLRAWHFMGCGWCGNMCGQQKECPGSWQQDHCPPKLTEFHPHSGPLRGSTRLTLCGSNFYLHPSGLVPEGTHQVTVGQSPCRPLPKDSSKLRPVPRKDFVEEFECELEPLGTQAVGPTNVSLTVTNMPPGKHFRVDGTSVLRGFSFMEPVLIAVQPLFGPRAGGTCLTLEGQSLSVGTSRAVLVNGTECLLARVSEGQLLCATPPGATVASVPLSLQVGGAQVPGSWTFQYREDPVVLSISPNCGYINSHITICGQHLTSAWHLVLSFHDGLRAVESRCERQLPEQQLCRLPEYVVRDPQGWVAGNLSARGDGAAGFTLPGFRFLPPPHPPSANLVPLKPEEHAIKFEYIGLGAVADCVGINVTVGGESCQHEFRGDMVVCPLPPSLQLGQDGAPLQVCVDGECHILGRVXRPGPDGVPQSTLLGILLPLLLLVAALATALVFSYWWRRKQLVLPPNLNDLASLDQTAGATPLPILYSGSDYRSGLALPAIDGLDSTTCVHGASFSDSEDESCVPLLRKESIQLRDLDSALLAEVKDVLIPHERVVTHSDRVIGKGHFGVVYHGEYIDQAQNRIQCAIKSLSRITEMQQVEAFLREGLLMRGLNHPNVLALIGIMLPPEGLPHVLLPYMCHGDLLQFIRSPQRNPTVKDLISFGLQVARXMEYLAEQKFVHRDLAARNCMLDESFTVKVADFGLARXILDREYYSVQQHRHARLPVKWXALESLQTYRFTTKSDVWSFGVLLWELLTRGAPPYRHIDPFDLTHFLAQGRRLPQPEYCPDSLYQVMQQCWEADPAVRPTFXVLVGEVEQIVSALLGDHYVQLPATYMNLGPSTSHEMNVRPEQPQFSPMPGNVRRPRPLSEPPRPT

SEQ ID NO: 449 - protein, 972 aa, Homo sapiens
  VARIANT 279: Xaa = V or M
  VARIANT 362: Xaa = H or R
  VARIANT 969: Xaa = Y or C
MGPGVLLLLLVATAWHGQGIPVIEPSVPELVVKPGATVTLRCVGNGSVEWDGPPSPHWTLYSDGSSSILSTNNATFQNTGTYRCTEPGDPLGGSAAIHLYVKDPARPWNVLAQEVVVFEDQDALLPCLLTDPVLEAGVSLVRVRGRPLMRHTNYSFSPWHGFTIHRAKFIQSQDYQCSALMGGRKVMSISIRLKVQKVIPGPPALTLVPAELVRIRGEAAQIVCSASSVDVNFDVFLQHNNTKLAIPQQSDFHNNRYQKVLTLNLDQVDFQHAGNYSCXASNVQGKHSTSMFFRVVESAYLNLSSEQNLIQEVTVGEGLNLKVMVEAYPGLQGFNWTYLGPFSDHQPEPKLANATTKDTYRXTFTLSLPRLKPSEAGRYSFLARNPGGWRALTFELTLRYPPEVSVIWTFINGSGTLLCAASGYPQPNVTWLQCSGHTDRCDEAQVLQVWDDPYPEVLSQEPFHKVTVQSLLTVETLEHNQTYECRAHNSVGSGSWAFIPISAGAHTHPPDEFLFTPVVVACMSIMALLLLLLLLLLYKYKQKPKYQVRWKIIESYEGNSYTFIDPTQLPYNEKWEFPRNNLQFGKTLGAGAFGKVVEATAFGLGKEDAVLKVAVKMLKSTAHADEKEALMSELKIMSHLGQHENIVNLLGACTHGGPVLVITEYCCYGDLLNFLRRKAEAMLGPSLSPGQDPEGGVDYKNIHLEKKYVRRDSGFSSQGVDTYVEMRPVSTSSNDSFSEQDLDKEDGRPLELRDLLHFSSQVAQGMAFLASKNCIHRDVAARNVLLTNGHVAKIGDFGLARDIMNDSNYIVKGNARLPVKWMAPESIFDCVYTVQSDVWSYGILLWEIFSLGLNPYPGILVNSKFYKLVKDGYQMAQPAFAPKNIYSIMQACWALEPTHRPTFQQICSFLQEQAQEDRRERDYTNLPSSSRSGGSGSSSSELEEESSSEHLTCCEQGDIAQPLLQPNNXQFC

SEQ ID NO: 450 - protein, 993 aa, Homo sapiens
  VARIANT 835: Xaa = D or Y or H or F
  VARIANT 836: Xaa = I or S
  VARIANT 841: Xaa = N or I
  VARIANT 842: Xaa = Y or H
MPALARDAGTVPLLVVFSAMIFGTITNQDLPVIKCVLINHKNNDSSVGKSSSYPMVSESPEDLGCALRPQSSGTVYEAAAVEVDVSASITLQVLVDAPGNISCLWVFKHSSLNCQPHFDLQNRGVVSMVILKMTETQAGEYLLFIQSEATNYTILFTVSIRNTLLYTLRRPYFRKMENQDALVCISESVPEPIVEWVLCDSQGESCKEESPAVVKKEEKVLHELFGTDIRCCARNELGRECTRLFTIDLNQTPQTTLPQLFLKVGEPLWIRCKAVHVNHGFGLTWELENKALEEGNYFEMSTYSTNRTMIRILFAFVSSVARNDTGYYTCSSSKHPSQSALVTIVGKGFINATNSSEDYEIDQYEEFCFSVRFKAYPQIRCTWTFSRKSFPCEQKGLDNGYSISKFCNHKHQPGEYIFHAENDDAQFTKMFTLNIRRKPQVLAEASASQASCFSDGYPLPSWTWKKCSDKSPNCTEEITEGVWNRKANRKVFGQWVSSSTLNMSEAIKGFLVKCCAYNSLGTSCETILLNSPGPFPFIQDNISFYATIGVCLLFIVVLTLLICHKYKKQFRYESQLQMVQVTGSSDNEYFYVDFREYEYDLKWEFPRENLEFGKVLGSGAFGKVMNATAYGISKTGVSIQVAVKMLKEKADSSEREALMSELKMMTQLGSHENIVNLLGACTLSGPIYLIFEYCCYGDLLNYLRSKREKFHRTWTEIFKEHNFSFYPTFQSHPNSSMPGSREVQIHPDSDQISGLHGNSFHSEDEIEYENQKRLEEEEDLNVLTFEDLLCFAYQVAKGMEFLEFKSCVHRDLAARNVLVTHGKVVKICDFGLARXXMSDSXXVVRGNARLPVKWMAPESLFEGIYTIKSDVWSYGILLWEIFSLGVNPYPGIPVDANFYKLIQNGFKMDQPFYATEEIYIIMQSCWAFDSRKRPSFPNLTSFLGCQLADAEEAMYQNVDGRVSECPHTYQNRRPFSREMDLGLLSPQAQVEDS

SEQ ID NO: 451 - protein, 976 aa, Homo sapiens
  VARIANT 541: Xaa = M or L or V
  VARIANT 557: Xaa = W or R
  VARIANT 664: Xaa = G or R
  VARIANT 788, 136: Xaa = C or R
  VARIANT 802: Xaa = T or I
  VARIANT 816, 820: Xaa = D or V or H or Y
  VARIANT 822: Xaa = N or Y or K
  VARIANT 823: Xaa = Y or D or C
  VARIANT 835: Xaa = W or R
  VARIANT 869: Xaa = P or S
  VARIANT 900: Xaa = Y or F
  VARIANT 52: Xaa = D or N
  VARIANT 178: Xaa = A or T
MRGARGAWDFLCVLLLLLRVQTGSSQPSVSPGEPSPPSIHPGKSDLIVRVGXEIRLLCTDPGFVKWTFEILDETNENKQNEWITEKAEATNTGKYTCTNKHGLSNSIYVFVRDPAKLFLVDRSLYGKEDNDTLVRXPLTDPEVTNYSLKGCQGKPLPKDLRFIPDPKAGIMIKSVKRXYHRLCLHCSVDQEGKSVLSEKFILKVRPAFKAVPVVSVSKASYLLREGEEFTVTCTIKDVSSSVYSTWKRENSQTKLQEKYNSWHHGDFNYERQATLTISSARVNDSGVFMCYANNTFGSANVTTTLEVVDKGFINIFPMINTTVFVNDGENVDLIVEYEAFPKPEHQQWIYMNRTFTDKWEDYPKSENESNIRYVSELHLTRLKGTEGGTYTFLVSNSDVNAAIAFNVYVNTKPEILTYDRLVNGMLQCVAAGFPEPTIDWYFCPGTEQRCSASVLPVDVQTLNSSGPPFGKLVVQSSIDSSAFKHNGTVECKAYNDVGKTSAYFNFAFKGNNKEQIHPHTLFTPLLIGFVIVAGMMCIIVXILTYKYLQKPMYEVQXKVVEEINGNNYVYIDPTQLPYDHKWEFPRNRLSFGKTLGAGAFGKVVEATAYGLIKSDAAMTVAVKMLKPSAHLTEREALMSELKVLSYLGNHMNIVNLLGACTIGXPTLVITEYCCYGDLLNFLRRKRDSFICSKQEDHAEAALYKNLLHSKESSCSDSTNEYMDMKPGVSYVVPTKADKRRSVRIGSYIERDVTPAIMEDDELALDLEDLLSFSYQVAKGMAFLASKNXIHRDLAARNILLXHGRITKICDFGLARXIKNXSXXVVKGNARLPVKXMAPESIFNCVYTFESDVWSYGIFLWELFSLGSSXYPGMPVDSKFYKMIKEGFRMLSPEHAPAEMXDIMKTCWDADPLKRPTFKQIVQLIEKQISESTNHIYSNLANCSPNRQKPVVDHSVRINSVGSTASSSQPLLVHDDV

SEQ ID NO: 452 - protein, 1106 aa, Homo sapiens
  VARIANT 29: Xaa = I or F
  VARIANT 194: Xaa = I or T
  VARIANT 345: Xaa = P or S
MRLPGAMPALALKGELLLLSLLLLLEPQXSQGLVVTPPGPELVLNVSSTFVLTCSGSAPVVWERMSQEPPQEMAKAQDGTFSSVLTLTNLTGLDTGEYFCTHNDSRGLETDERKRLYIFVPDPTVGFLPNDAEELFIFLTEITEITIPCRVTDPQLVVTLHEKKGDVALPVPYDHQRGFSGIFEDRSYICKTTXGDREVDSDAYYVYRLQVSSINVSVNAVQTVVRQGENITLMCIVIGNEVVNFEWTYPRKESGRLVEPVTDFLLDMPYHIRSILHIPSAELEDSGTYTCNVTESVNDHQDEKAINITVVESGYVRLLGEVGTLQFAELHRSRTLQVVFEAYPXPTVLWFKDNRTLGDSSAGEIALSTRNVSETRYVSELTLVRVKVAEAGHYTMRAFHEDAEVQLSFQLQINVPVRVLELSESHPDSGEQTVRCRGRGMPQPNIIWSACRDLKRCPRELPPTLLGNSSEEESQLETNVTYWEEEQEFEVVSTLRLQHVDRPLSVRCTLRNAVGQDTQEVIVVPHSLPFKVVVISAILALVVLTIISLIILIMLWQKKPRYEIRWKVIESVSSDGHEYIYVDPMQLPYDSTWELPRDQLVLGRTLGSGAFGQVVEATAHGLSHSQATMKVAVKMLKSTARSSEKQALMSELKIMSHLGPHLNVVNLLGACTKGGPIYIITEYCRYGDLVDYLHRNKHTFLQHHSDKRRPPSAELYSNALPVGLPLPSHVSLTGESDGGYMDMSKDESVDYVPMLDMKGDVKYADIESSNYMAPYDNYVPSAPERTCRATLINESPVLSYMDLVGFSYQVANGMEFLASKNCVHRDLAARNVLICEGKLVKICDFGLARDIMRDSNYISKGSTFLPLKWMAPESIFNSLYTTLSDVWSFGILLWEIFTLGGTPYPELPMNEQFYNAIKRGYRMAQPAHASDEIYEIMQKCWEEKFEIRPPFSQLVLLLERLLGEGYKKKYQQVDEEFLRSDHPAILRSQARLPGFHGLRSPLDTSSVLYTAVQPNEGDNDYIIPLPDPKPEVADEGPLEGSPSLASSTLNEVNTSSTISCDSPLEPQDEPEPEPQLELQVEPEPELEQLPDSGCPAPRAEAEDSFL

SEQ ID NO: 453 - protein, 404 aa, Homo sapiens
  VARIANT 77: Xaa = C, R
  VARIANT 82: Xaa = G, S
  VARIANT 305: Xaa = H, Q
  VARIANT 307: Xaa = C, S
  VARIANT 365: Xaa = R, S
  VARIANT 369: Xaa = G, Q, R
MAAGTAVGAWVLVLSLWGAVVGAQNITARIGEPLVLKCKGAPKKPPQRLEWKLNTGRTEAWKVLSPQGGGPWDSVAXVLPNXSLFLPAVGIQDEGIFRCQAMNRNGKETKSNYRVRVYQIPGKPEIVDSASELTAGVPNKVGTCVSEGSYPAGTLSWHLDGKPLVPNEKGVSVKEQTRRHPETGLFTLQSELMVTPARGGDPRPTFSCSFSPGLPRHRALRTAPIQPRVWEPVPLEEVQLVVEPEGGAVAPGGTVTLTCEVPAQPSPQIHWMKDGVPLPLPPSPVLILPEIGPQDQGTYSCVATXSXHGPQESRAVSISIIEPGEEGPTAGSVGGSGLGTLALALGILGGLGTAALLIGVILWQXRQRXGEERKAPENQEEEEERAELNQSEEPEAGESSTGGP

SEQ ID NO: 454 - protein, 1124 aa, Homo sapiens
  VARIANT 346: Xaa = P or Q
  VARIANT 486: Xaa = V or I
  VARIANT 695: Xaa = I or T
  VARIANT 724: Xaa = A or T
  VARIANT 849: Xaa = R or W
MDSLASLVLCGVSLLLSGTVEGAMDLILINSLPLVSDAETSLTCIASGWRPHEPITIGRDFEALMNQHQDPLEVTQDVTREWAKKVVWKREKASKINGAYFCEGRVRGEAIRIRTMKMRQQASFLPATLTMTVDKGDNVNISFKKVLIKEEDAVIYKNGSFIHSVPRHEVPDILEVHLPHAQPQDAGVYSARYIGGNLFTSAFTRLIVRRCEAQKWGPECNHLCTACMNNGVCHEDTGECICPPGFMGRTCEKACELHTFGRTCKERCSGQEGCKSYVFCLPDPYGCSCATGWKGLQCNEACHPGFYGPDCKLRCSCNNGEMCDRFQGCLCSPGWQGLQCEREGIXRMTPKIVDLPDHIEVNSGKFNPICKASGWPLPTNEEMTLVKPDGTVLHPKDFNHTDHFSVAIFTIHRILPPDSGVWVCSVNTVAGMVEKPFNISVKVLPKPLNAPNVIDTGHNFAVINISSEPYFGDGPIKSKKLLYKPXNHYEAWQHIQVTNEIVTLNYLEPRTEYELCVQLVRRGEGGEGHPGPVRRFTTASIGLPPPRGLNLLPKSQTTLNLTWQPIFPSSEDDFYVEVERRSVQKSDQQNIKVPGNLTSVLLNNLHPREQYVVRARVNTKAQGEWSEDLTAWTLSDILPPQPENIKISNITHSSAVISWTILDGYSISSITIRYKVQGKNEDQHVDVKIKNATIXQYQLKGLEPETAYQVDIFAENNIGSSNPXFSHELVTLPESQAPADLGGGKMLLIAILGSAGMTCLTVLLAFLIILQLKRANVQRRMAQAFQNVREEPAVQFNSGTLALNRKVKNNPDPTIYPVLDWNDIKFQDVIGEGNFGQVLKARIKKDGLXMDAAIKRMKEYASKDDHRDFAGELEVLCKLGHHPNIINLLGACEHRGYLYLAIEYAPHGNLLDFLRKSRVLETDPAFAIANSTASTLSSQQLLHFAADVARGMDYLSQKQFIHRDLAARNILVGENYVAKIADFGLSRGQEVYVKKTMGRLPVRWMAIESLNYSVYTTNSDVWSYGVLLWEIVSLGGTPYCGMTCAELYEKLPQGYRLEKPLNCDDEVYDLMRQCWREKPYERPSFAQILVSLNRMLEERKTYVNTTLYEKFTYAGIDCSAEEAA

SEQ ID NO: 455 - protein, 1138 aa, Homo sapiens
  VARIANT 142: Xaa = A or T
  VARIANT 1109: Xaa = R or C
MVWRVPPFLLPILFLASHVGAAVDLTLLANLRLTDPQRFFLTCVSGEAGAGRGSDAWGPPLLLEKDDRIVRTPPGPPLRLARNGSHQVTLRGFSKPSDLVGVFSCVGGAGARRTRVIYVHNSPGAHLLPDKVTHTVNKGDTXVLSARVHKEKQTDVIWKSNGSYFYTLDWHEAQDGRFLLQLPNVQPPSSGIYSATYLEASPLGSAFFRLIVRGCGAGRWGPGCTKECPGCLHGGVCHDHDGECVCPPGFTGTRCEQACREGRFGQSCQEQCPGISGCRGLTFCLPDPYGCSCGSGWRGSQCQEACAPGHFGADCRLQCQCQNGGTCDRFSGCVCPSGWHGVHCEKSDRIPQILNMASELEFNLETMPRINCAAAGNPFPVRGSIELRKPDGTVLLSTKAIVEPEKTTAEFEVPRLVLADSGFWECRVSTSGGQDSRRFKVNVKVPPVPLAAPRLLTKQSRQLVVSPLVSFSGDGPISTVRLHYRPQDSTMDWSTIVVDPSENVTLMNLRPKTGYSVRVQLSRPGEGGEGAWGPPTLMTTDCPEPLLQPWLEGWHVEGTDRLRVSWSLPLVPGPLVGDGFLLRLWDGTRGQERRENVSSPQARTALLTGLTPGTHYQLDVQLYHCTLLGPASPPAHVLLPPSGPPAPRHLHAQALSDSEIQLTWKHPEALPGPISKYVVEVQVAGGAGDPLWIDVDRPEETSTIIRGLNASTRYLFRMRASIQGLGDWSNTVEESTLGNGLQAEGPVQESRAAEEGLDQQLILAVVGSVSATCLTILAALLTLVCIRRSCLHRRRTFTYQSGSGEETILQFSSGTLTLTRRPKLQPEPLSYPVLEWEDITFEDLIGEGNFGQVIRAMIKKDGLKMNAAIKMLKEYASENDHRDFAGELEVLCKLGHHPNIINLLGACKNRGYLYIAIEYAPYGNLLDFLRKSRVLETDPAFAREHGTASTLSSRQLLRFASDAANGMQYLSEKQFIHRDLAARNVLVGENLASKIADFGLSRGEEVYVKKTMGRLPVRWMAIESLNYSVYTTKSDVWSFGVLLWEIVSLGGTPYCGMTCAELYEKLPQGYRMEQPRNCDDEVYELMRQCWRDRPYERPPFAQIALQLGXMLEARKAYVNMSLFENFTYAGIDATAEEA

SEQ ID NO: 456 - protein, 455 aa, Homo sapiens
  VARIANT 75: Xaa = P or I
  VARIANT 121: Xaa = R or Q
  VARIANT 305: Xaa = P or T
MGLSTVPDLLLPLVLLELLVGIYPSGVIGLVPHLGDREKRDSVCPQGKYIHPQNNSICCTKCHKGTYLYNDCPGXGQDTDCRECESGSFTASENHLRHCLSCSKCRKEMGQVEISSCTVDXDTVCGCRKNQYRHYWSENLFQCFNCSLCLNGTVHLSCQEKQNTVCTCHAGFFLRENECVSCSNCKKSLECTKLCLPQIENVKGTEDSGTTVLLPLVIFFGLCLLSLLFIGLMYRYQRWKSKLYSIVCGKSTPEKEGELEGTTTKPLAPNPSFSPTPGFTPTLGFSPVPSSTFTSSSTYTPGDCXNFAAPRREVAPPYQGADPILATALASDPIPNPLQKWEDSAHKPQSLDTDDPATLYAVVENVPPLRWKEFVRRLGLSDHEIDRLELQNGRCLREAQYSMLATWRRRTPRREATLELLGRVLRDMDLLGCLEDIEEALCGPAALPPAPSLLR

SEQ ID NO: 457 - protein, 461 aa, Homo sapiens
  VARIANT 187: Xaa = V or M
  VARIANT 196: Xaa = M or R
  VARIANT 232: Xaa = E or K
  VARIANT 236: Xaa = A or T
  VARIANT 264: Xaa = L or P
  VARIANT 295: Xaa = Q or R
MAPVAVWAALAVGLELWAAAHALPAQVAFTPYAPEPGSTCRLREYYDQTAQMCCSKCSPGQHAKVFCTKTSDTVCDSCEDSTYTQLWNWVPECLSCGSRCSSDQVETQACTREQNRICTCRPGWYCALSKQEGCRLCAPLRKCRPGFGVARPGTETSDVVCKPCAPGTFSNTTSSTDICRPHQICNXVAIPGNASXDAVCTSTSPTRSMAPGAVHLPQPVSTRSQHTQPTPXPSTXPSTSFLLPMGPSPPAEGSTGDFALPVGXIVGVTALGLLIIGVVNCVIMTQVKKKPLCLXREAKVPHLPADKARGTQGPEQQHLLITAPSSSSSSLESSASALDRRAPTRNQPQAPGVEASGAGEARASTGSSDSSPGGHGTQVNVTCIVNVCSSSDHSSQCSSQASSTMGDTDSSPSESPKDEQVPFSKEECAFRSQLETPETLLGSTEEKPLPLGVPDAGMKPS

SEQ ID NO: 458 - protein, 1356 aa, Homo sapiens
  VARIANT 297, 952: Xaa = V or I
  VARIANT 349: Xaa = R or K
  VARIANT 392: Xaa = D or N
  VARIANT 472: Xaa = Q or H
  VARIANT 772: Xaa = A or T
  VARIANT 787: Xaa = R or G
  VARIANT 835: Xaa = K or N
  VARIANT 848: Xaa = V or E
  VARIANT 1147: Xaa = P or S
  VARIANT 1210: Xaa = P or A
  VARIANT 1347: Xaa = S or T
MQSKVLLAVALWLCVETRAASVGLPSVSLDLPRLSIQKDILTIKANTTLQITCRGQRDLDWLWPNNQSGSEQRVEVTECSDGLFCKTLTIPKVIGNDTGAYKCFYRETDLASVIYVYVQDYRSPFIASVSDQHGVVYITENKNKTVVIPCLGSISNLNVSLCARYPEKRFVPDGNRISWDSKKGFTIPSYMISYAGMVFCEAKINDESYQSIMYIVVVVGYRIYDVVLSPSHGIELSVGEKLVLNCTARTELNVGIDFNWEYPSSKHQHKKLVNRDLKTQSGSEMKKFLSTLTIDGXTRSDQGLYTCAASSGLMTKKNSTFVRVHEKPFVAFGSGMESLVEATVGERVXIPAKYLGYPPPEIKWYKNGIPLESNHTIKAGHVLTIMEVSERXTGNYTVILTNPISKEKQSHVVSLVVYVPPQIGEKSLISPVDSYQYGTTQTLTCTVYAIPPPHHIHWYWQLEEECANEPSXAVSVTNPYPCEEWRSVEDFQGGNKIEVNKNQFALIEGKNKTVSTLVIQAANVSALYKCEAVNKVGRGERVISFHVTRGPEITLQPDMQPTEQESVSLWCTADRSTFENLTWYKLGPQPLPIHVGELPTPVCKNLDTLWKLNATMFSNSTNDILIMELKNASLQDQGDYVCLAQDRKTKKRHCVVRQLTVLERVAPTITGNLENQTTSIGESIEVSCTASGNPPPQIMWFKDNETLVEDSGIVLKDGNRNLTIRRVRKEDEGLYTCQACSVLGCAKVEAFFIIEGAQEKTNLEIIILVGTXVIAMFFWLLLVIILXTVKRANGGELKTGYLSIVMDPDELPLDEHCERLPYDASKWEFPRDRLXLGKPLGRGAFGQXIEADAFGIDKTATCRTVAVKMLKEGATHSEHRALMSELKILIHIGHHLNVVNLLGACTKPGGPLMVIVEFCKFGNLSTYLRSKRNEFVPYKTKGARFRQGKDYXGAIPVDLKRRLDSITSSQSSASSGFVEEKSLSDVEEEEAPEDLYKDFLTLEHLICYSFQVAKGMEFLASRKCIHRDLAARNILLSEKNVVKICDFGLARDIYKDPDYVRKGDARLPLKWMAPETIFDRVYTIQSDVWSFGVLLWEIFSLGASPYPGVKIDEEFCRRLKEGTRMRAPDYTTPEMYQTMLDCWHGEXSQRPTFSELVEHLGNLLQANAQQDGKDYIVLPISETLSMEEDSGLSLPTSPVSCMEEEEVCDXKFHYDNTAGISQYLQNSKRKSRPVSVKTFEDIPLEEPEVKVIPDDNQTDSGMVLASEELKTLEDRTKLSPSFGGMVPSKSRESVASEGSNQTSGYQSGYHSDDTDTTVYSSEEAELLKLIEIGVQTGSTAQILQPDXGTTLSSPPV

SEQ ID NO: 459 - protein, 1298 aa, Homo sapiens
  VARIANT 134: Xaa = D or G
  VARIANT 134: Xaa = D or G
  VARIANT 149: Xaa = N or D
  VARIANT 494: Xaa = T or A
  VARIANT 854: Xaa = G or S
  VARIANT 890: Xaa = Q or H
  VARIANT 915: Xaa = A or P
  VARIANT 916: Xaa = C or W
  VARIANT 933: Xaa = G or R
  VARIANT 954: Xaa = P or S
  VARIANT 1008: Xaa = P or L
  VARIANT 1041: Xaa = R or Q
  VARIANT 1137: Xaa = P or L
  VARIANT 1164: Xaa = D or E
  VARIANT 1189: Xaa = R or L
  VARIANT 1324: Xaa = R or L
MQRGAALCLRLWLCLGLLDGLVSXYSMTPPTLNITEESHVIDTGDSLSISCRGQHPLEWAWPGAQEAPATGDKDSEDTGVVRDCEGTDARPYCKVLLLHEVHANDTGSYVCYYKYIKARIEGTTAASSYVFVRXFEQPFINKPDTLLVXRKDAMWVPCLVSIPGLNVTLRSQSSVLWPDGQEVVWDDRRGMLVSTPLLHDALYLQCETTWGDQDFLSNPFLVHITGNELYDIQLLPRKSLELLVGEKLVLNCTVWAEFNSGVTFDWDYPGKQAERGKWVPERRSQQTHTELSSILTIHNVSQHDLGSYVCKANNGIQRFRESTEVIVHENPFISVEWLKGPILEATAGDELVKLPVKLAAYPPPEFQWYKDGKALSGRHSPHALVLKEVTEASTGTYTLALWNSAAGLRRNISLELVVNVPPQIHEKEASSPSIYSRHSRQALTCTAYGVPLPLSIQWHWRPWTPCKMFAQRSLRRRQQQDLMPQCRDWRAVTXQDAVNPIESLDTWTEFVEGKNKTVSKLVIQNANVSAMYKCVVSNKVGQDERLIYFYVTTIPDGFTIESKPSEELLEGQPVLLSCQADSYKYEHLRWYRLNLSTLHDAHGNPLLLDCKNVHLFATPLAASLEEVAPGARHATLSLSIPRVAPEHEGHYVCEVQDRRSHDKHCHKKYLSVQALEAPRLTQNLTDLLVNVSDSLEMQCLVAGAHAPSIVWYKDERLLEEKSGVDLADSNQKLSIQRVREEDAGPYLCSVCRPKGCVNSSASVAVEGSEDKGSMEIVILVGTGVIAVFFWVLLLLIFCNMRRPAHADIKTGYLSIIMDPGEVPLEEQCEYLSYDASQWEFPRERLHLGRVLGYXAFGKVVEASAFGIHKGSSCDTVAVKMLKEGATASEXRALMSELKILIHIGNHLNVVNLLGXXTKPQGPLMVIVEFCKYXNLSNFLRAKRDAFSPCAEKSXEQRGRFRAMVELARLDRRRPGSSDRVLFARFSKTEGGARRASPDQEAEDLWLSXLTMEDLVCYSFQVARGMEFLASRKCIHRDLAAXNILLSESDVVKICDFGLARDIYKDPDYVRKGSARLPLKWMAPESIFDKVYTTQSDVWSFGVLLWEIFSLGASPYPGVQINEEFCQRVRDGTRMRAXELATPAIRHIMLNCWSGDPKARPAFSXLVEILGDLLQGRGLQEEEEVCMAPXSSQSSEEGSFSQVSTMALHIAQADAEDSPPSLQRHSLAARYYNWVSFPGCLARGAETRGSSRMKTFEEFPMTPTTYKGSVDNQTDSGMVLASEEFEQIESRHRQESGFR

SEQ ID NO: 460 - DNA, 2820 bp, Homo sapiens
  ref <308>: DATABASE ACCESSION NUMBER: GenBank No. NM_000601
  ref <309>: DATABASE ENTRY DATE: 2005-10-18
gggagttcagacctagatctttccagttaatcacacaacaaacttagctcatcgcaataaaaagcagctcagagccgactggctcttttaggcactgactccgaacaggattctttcacccaggcatctcctccagagggatccgccagcccgtccagcagcaccatgtgggtgaccaaactcctgccagccctgctgctgcagcatgtcctcctgcatctcctcctgctccccatcgccatcccctatgcagagggacaaaggaaaagaagaaatacaattcatgaattcaaaaaatcagcaaagactaccctaatcaaaatagatccagcactgaagataaaaaccaaaaaagtgaatactgcagaccaatgtgctaatagatgtactaggaataaaggacttccattcacttgcaaggcttttgtttttgataaagcaagaaaacaatgcctctggttccccttcaatagcatgtcaagtggagtgaaaaaagaatttggccatgaatttgacctctatgaaaacaaagactacattagaaactgcatcattggtaaaggacgcagctacaagggaacagtatctatcactaagagtggcatcaaatgtcagccctggagttccatgataccacacgaacacagctttttgccttcgagctatcggggtaaagacctacaggaaaactactgtcgaaatcctcgaggggaagaagggggaccctggtgtttcacaagcaatccagaggtacgctacgaagtctgtgacattcctcagtgttcagaagttgaatgcatgacctgcaatggggagagttatcgaggtctcatggatcatacagaatcaggcaagatttgtcagcgctgggatcatcagacaccacaccggcacaaattcttgcctgaaagatatcccgacaagggctttgatgataattattgccgcaatcccgatggccagccgaggccatggtgctatactcttgaccctcacacccgctgggagtactgtgcaattaaaacatgcgctgacaatactatgaatgacactgatgttcctttggaaacaactgaatgcatccaaggtcaaggagaaggctacaggggcactgtcaataccatttggaatggaattccatgtcagcgttgggattctcagtatcctcacgagcatgacatgactcctgaaaatttcaagtgcaaggacctacgagaaaattactgccgaaatccagatgggtctgaatcaccctggtgttttaccactgatccaaacatccgagttggctactgctcccaaattccaaactgtgatatgtcacatggacaagattgttatcgtgggaatggcaaaaattatatgggcaacttatcccaaacaagatctggactaacatgttcaatgtgggacaagaacatggaagacttacatcgtcatatcttctgggaaccagatgcaagtaagctgaatgagaattactgccgaaatccagatgatgatgctcatggaccctggtgctacacgggaaatccactcattccttgggattattgccctatttctcgttgtgaaggtgataccacacctacaatagtcaatttagaccatcccgtaatatcttgtgccaaaacgaaacaattgcgagttgtaaatgggattccaacacgaacaaacataggatggatggttagtttgagatacagaaataaacatatctgcggaggatcattgataaaggagagttgggttcttactgcacgacagtgtttcccttctcgagacttgaaagattatgaagcttggcttggaattcatgatgtccacggaagaggagatgagaaatgcaaacaggttctcaatgtttcccagctggtatatggccctgaaggatcagatctggttttaatgaagcttgccaggcctgctgtcctggatgattttgttagtacgattgatttacctaattatggatgcacaattcctgaaaagaccagttgcagtgtttatggctggggctacactggattgatcaactatgatggcctattacgagtggcacatctctatataatgggaaatgagaaatgcagccagcatcatcgagggaaggtgactctgaatgagtctgaaatatgtgctggggctgaaaagattggatcaggaccatgtgagggggattatggtggcccacttgtttgtgagcaacataaaatgagaatggttcttggtgtcattgttcctggtcgtggatgtgccattccaaatcgtcctggtatttttgtccgagtagcatattatgcaaaatggatacacaaaattattttaacatataaggtaccacagtcatagctgaagtaagtgtgtctgaagcacccaccaatacaactgtcttttacatgaagatttcagagaatgtggaatttaaaatgtcacttacaacaatcctaagacaactactggagagtcatgtttgttgaaattctcattaatgtttatgggtgttttctgttgttttgtttgtcagtgttattttgtcaatgttgaagtgaattaaggtacatgcaagtgtaataacatatctcctgaagatacttgaatggattaaaaaaacacacaggtatatttgctggatgataaagatttcatgggaaaaaaaatcaattaatctgtctaagctgctttctgatgttggtttcttaataatgagtaaaccacaaattaaatgttattttaacctcaccaaaacaatttataccttgtgtccctaaattgtagccctatattaaattatattacatttcaaaaaaaaaaaaaaaa

SEQ ID NO: 461 - protein, 728 aa, Homo sapiens
  ref <308>: DATABASE ACCESSION NUMBER: GenBank No. NP000592
  ref <309>: DATABASE ENTRY DATE: 2005-10-18
MWVTKLLPALLLQHVLLHLLLLPIAIPYAEGQRKRRNTIHEFKKSAKTTLIKIDPALKIKTKKVNTADQCANRCTRNKGLPFTCKAFVFDKARKQCLWFPFNSMSSGVKKEFGHEFDLYENKDYIRNCIIGKGRSYKGTVSITKSGIKCQPWSSMIPHEHSFLPSSYRGKDLQENYCRNPRGEEGGPWCFTSNPEVRYEVCDIPQCSEVECMTCNGESYRGLMDHTESGKICQRWDHQTPHRHKFLPERYPDKGFDDNYCRNPDGQPRPWCYTLDPHTRWEYCAIKTCADNTMNDTDVPLETTECIQGQGEGYRGTVNTIWNGIPCQRWDSQYPHEHDMTPENFKCKDLRENYCRNPDGSESPWCFTTDPNIRVGYCSQIPNCDMSHGQDCYRGNGKNYMGNLSQTRSGLTCSMWDKNMEDLHRHIFWEPDASKLNENYCRNPDDDAHGPWCYTGNPLIPWDYCPISRCEGDTTPTIVNLDHPVISCAKTKQLRVVNGIPTRTNIGWMVSLRYRNKHICGGSLIKESWVLTARQCFPSRDLKDYEAWLGIHDVHGRGDEKCKQVLNVSQLVYGPEGSDLVLMKLARPAVLDDFVSTIDLPNYGCTIPEKTSCSVYGWGYTGLINYDGLLRVAHLYIMGNEKCSQHHRGKVTLNESEICAGAEKIGSGPCEGDYGGPLVCEQHKMRMVLGVIVPGRGCAIPNRPGIFVRVAYYAKWIHKIILTYKVPQS

SEQ ID NO: 462 - protein, 728 aa, Homo sapiens
  HGF sequence variants
  VARIANT 78: Xaa = Lys or Asn
  VARIANT 82: Xaa = Phe or Leu
  VARIANT 153: Xaa = Ser or Ile
  VARIANT 180: Xaa = Pro or Thr
  VARIANT 293: Xaa = Met or Val
  VARIANT 300: Xaa = Leu or Met
  VARIANT 304: Xaa = Glu or Lys
  VARIANT 317: Xaa = Val or Ala
  VARIANT 325: Xaa = Pro or Ser
  VARIANT 330: Xaa = Asp or Tyr
  VARIANT 336: Xaa = Glu or Lys
  VARIANT 387: Xaa = His or Asn
  VARIANT 416: Xaa = Asp or Asn
  VARIANT 494: Xaa = Arg or Gln
  VARIANT 505: Xaa = Ile or Val
  VARIANT 509: Xaa = Val or Ile
  VARIANT 558: Xaa = Asp or Glu
  VARIANT 561: Xaa = Cys or Arg
  VARIANT 592: Xaa = Asp or Asn
  VARIANT 595: Xaa = Ser or Asn
MWVTKLLPALLLQHVLLHLLLLPIAIPYAEGQRKRRNTIHEFKKSAKTTLIKIDPALKIKTKKVNTADQCANRCTRNXGLPXTCKAFVFDKARKQCLWFPFNSMSSGVKKEFGHEFDLYENKDYIRNCIIGKGRSYKGTVSITKSGIKCQPWXSMIPHEHSFLPSSYRGKDLQENYCRNPRGEEGGPWCFTSNPEVRYEVCDIPQCSEVECMTCNGESYRGLMDHTESGKICQRWDHQTXHRHKFLPERYPDKGFDDNYCRNPDGQPRPWCYTLDPHTRWEYCAIKTCADNTXNDTDVPXETTXCIQGQGEGYRGTXNTIWNGIXCQRWXSQYPHXHDMTPENFKCKDLRENYCRNPDGSESPWCFTTDPNIRVGYCSQIPNCDMSXGQDCYRGNGKNYMGNLSQTRSGLTCSMWXKNMEDLHRHIFWEPDASKLNENYCRNPDDDAHGPWCYTGNPLIPWDYCPISRCEGDTTPTIVNLDHPVISCAKTKQLXVVNGIPTRTNXGWMXSLRYRNKHICGGSLIKESWVLTARQCFPSRDLKDYEAWLGIHDVHGRGXEKXKQVLNVSQLVYGPEGSDLVLMKLARPAVLDXFVXTIDLPNYGCTIPEKTSCSVYGWGYTGLINYDGLLRVAHLYIMGNEKCSQHHRGKVTLNESEICAGAEKIGSGPCEGDYGGPLVCEQHKMRMVLGVIVPGRGCAIPNRPGIFVRVAYYAKWIHKIILTYKVPQS

SEQ ID NO: 463 - DNA, 20 bp, Artificial Sequence
  Primer CSFIR_F1
ctgccacttccccaccgagg

SEQ ID NO: 464 - DNA, 22 bp, Artificial Sequence
  Primer DDR1_F1
gggatcaggagctatgggacca

SEQ ID NO: 465 - DNA, 24 bp, Artificial Sequence
  Primer DDR2_F1
ctgagatgatcctgattcccagaa

SEQ ID NO: 466 - DNA, 20 bp, Artificial Sequence
  Primer EPHA1_F1
ggagctatggagcggcgctg

SEQ ID NO: 467 - DNA, 20 bp, Artificial Sequence
  Primer EPHA2_F1
agcgagaagcgcggcatgga

SEQ ID NO: 468 - DNA, 23 bp, Artificial Sequence
  Primer EPHA3_F1
caccagcaacatggattgtcagc

SEQ ID NO: 469 - DNA, 23 bp, Artificial Sequence
  Primer EPHA4_F1
cgaaccatggctgggattttcta

SEQ ID NO: 470 - DNA, 23 bp, Artificial Sequence
  Primer EPHA7_F1
ataaaacctgctcatgcaccatg

SEQ ID NO: 471 - DNA, 21 bp, Artificial Sequence
  Primer EPHB1_F1
gcgatggccctggattatcta

SEQ ID NO: 472 - DNA, 18 bp, Artificial Sequence
  Primer EPHB2_F1
ccccgggaagcgcagcca

SEQ ID NO: 473 - DNA, 20 bp, Artificial Sequence
  Primer EPHB3_F1
gctcctagagctgccacggc

SEQ ID NO: 474 - DNA, 21 bp, Artificial Sequence
  Primer EPHB4_F1
gatcctacccgagtgaggcgg

SEQ ID NO: 475 - DNA, 21 bp, Artificial Sequence
  Primer CSFIR_R1
gggctcctgcagagatgggta

SEQ ID NO: 476 - DNA, 22 bp, Artificial Sequence
  Primer DDR1_R1
agagccattggggacacaggga

SEQ ID NO: 477 - DNA, 21 bp, Artificial Sequence
  Primer DDR2_R1
agcctgactcctcctcccctg

SEQ ID NO: 478 - DNA, 22 bp, Artificial Sequence
  Primer EPHA1_R1
agctctgtcagcaagaccctgg

SEQ ID NO: 479 - DNA, 22 bp, Artificial Sequence
  Primer EPHA2_R1
aggtggtgtctggggccaggtc

SEQ ID NO: 480 - DNA, 23 bp, Artificial Sequence
  Primer EPHA3_R1
gtcaggcttgaggctactgatgg

SEQ ID NO: 481 - DNA, 25 bp, Artificial Sequence
  Primer EPHA4_R1
aacataggaagtgagagggttcagg

SEQ ID NO: 482 - DNA, 23 bp, Artificial Sequence
  Primer EPHA7_R1
actccattgggatgctctggttc

SEQ ID NO: 483 - DNA, 21 bp, Artificial Sequence
  Primer EPHB1_R1
agcccatcaatccttgctgtg

SEQ ID NO: 484 - DNA, 20 bp, Artificial Sequence
  Primer EPHB2_R1
gcgtgcccgcacctggaaga

SEQ ID NO: 485 - DNA, 20 bp, Artificial Sequence
  Primer EPHB3_R1
gctggtcactgtggaggcga

SEQ ID NO: 486 - DNA, 21 bp, Artificial Sequence
  Primer EPHB4_R1
ggtagctggctccccgcttca

SEQ ID NO: 487 - DNA, 21 bp, Artificial Sequence
  Primer CSFIR_R2
ccgagggtcttaccaaactgc

SEQ ID NO: 488 - DNA, 22 bp, Artificial Sequence
  Primer DDR1_R2
aagcggagtcgagatcgaggga

SEQ ID NO: 489 - DNA, 20 bp, Artificial Sequence
  Primer DDR2_R2
ggggaactcctccacagcca

SEQ ID NO: 490 - DNA, 21 bp, Artificial Sequence
  Primer EPHA1_R2
cgggtaaagtccaaggctccc

SEQ ID NO: 491 - DNA, 23 bp, Artificial Sequence
  Primer EPHA2_R2
gacacaggatggatggatctcgg

SEQ ID NO: 492 - DNA, 24 bp, Artificial Sequence
  Primer EPHA3_R2
atcaatggatatgttggtggcatc

SEQ ID NO: 493 - DNA, 23 bp, Artificial Sequence
  Primer EPHA4_R2
aggatgcgtcaatttctttggca

SEQ ID NO: 494 - DNA, 21 bp, Artificial Sequence
  Primer EPHA7_R2
ctgcaccaatcacacgctcaa

SEQ ID NO: 495 - DNA, 22 bp, Artificial Sequence
  Primer EPHB1_R2
atcaatctccttggcaaactcc

SEQ ID NO: 496 - DNA, 20 bp, Artificial Sequence
  Primer EPHB2_R2
gcccatgatggaggcttcgc

SEQ ID NO: 497 - DNA, 21 bp, Artificial Sequence
  Primer EPHB3_R2
acgcaggacacgtcgatctcc

SEQ ID NO: 498 - DNA, 23 bp, Artificial Sequence
  Primer EPHB4_R2
acctgcaccaatcacctcttcaa

SEQ ID NO: 499 - DNA, 20 bp, Artificial Sequence
  Primer EPHB6_F1
agagtggcgggcatggtgtg

SEQ ID NO: 500 - DNA, 22 bp, Artificial Sequence
  Primer EPHB6_R1
gcggagctgatagtccaggatg

SEQ ID NO: 501 - DNA, 22 bp, Artificial Sequence
  Primer EPHB6_R2
cctgtcccaatgacctcctcaa

SEQ ID NO: 502 - DNA, 26 bp, Artificial Sequence
  Primer EPHA6_F1
ggagatgaaagactctccatttcaag

SEQ ID NO: 503 - DNA, 20 bp, Artificial Sequence
  Primer FGFR1_F1
attcgggatgtggagctgga

SEQ ID NO: 504 - DNA, 20 bp, Artificial Sequence
  Primer FGFR2_F1
aggaccggggattggtaccg

SEQ ID NO: 505 - DNA, 18 bp, Artificial Sequence
  Primer FGFR3_F1
catgggcgcccctgcctg

SEQ ID NO: 506 - DNA, 20 bp, Artificial Sequence
  Primer FGFR4_F1
agaaggagatgcggctgctg

SEQ ID NO: 507 - DNA, 22 bp, Artificial Sequence
  Primer TNFR1A(p55)_F1
agctgtctggcatgggcctctc

SEQ ID NO: 508 - DNA, 18 bp, Artificial Sequence
  Primer TNFR1B(p55)_F1
accggaccccgcccgcac

SEQ ID NO: 509 - DNA, 25 bp, Artificial Sequence
  Primer EPHA6_R1
atcttagaccgacagaaaatttggc

SEQ ID NO: 510 - DNA, 20 bp, Artificial Sequence
  Primer FGFR1_R1
caagggaccatcctgcgtgc

SEQ ID NO: 511 - DNA, 20 bp, Artificial Sequence
  Primer FGFR2_R1
aggggcttgcccagtgtcag

SEQ ID NO: 512 - DNA, 20 bp, Artificial Sequence
  Primer FGFR3_R1
gctcccatttggggtcggca

SEQ ID NO: 513 - DNA, 20 bp, Artificial Sequence
  Primer FGFR4_R1
cgggggaactcccatagtgg

SEQ ID NO: 514 - DNA, 22 bp, Artificial Sequence
  Primer TNFR1A(p55)_R1
ggcgcagcctcatctgagaaga

SEQ ID NO: 515 - DNA, 20 bp, Artificial Sequence
  Primer TNFR1B(p55)_R1
cacagcccacaccggcctgg

SEQ ID NO: 516 - DNA, 19 bp, Artificial Sequence
  Primer FLT3_F1
ggaggccatgccggcgttg

SEQ ID NO: 517 - DNA, 21 bp, Artificial Sequence
  Primer KIT-F1
cgcagctaccgcgatgagagg

SEQ ID NO: 518 - DNA, 20 bp, Artificial Sequence
  Primer MET_F1
ctcataatgaaggcccccgc

SEQ ID NO: 519 - DNA, 22 bp, Artificial Sequence
  Primer PDGFRA_F1
aagtttcccagagctatgggga

SEQ ID NO: 520 - DNA, 20 bp, Artificial Sequence
  Primer PDGFRB_F1
agcagcaaggacaccatgcg

SEQ ID NO: 521 - DNA, 20 bp, Artificial Sequence
  Primer RON_F1
ggtcccagctcgcctcgatg

SEQ ID NO: 522 - DNA, 22 bp, Artificial Sequence
  Primer TEK_F1
agatttggggaagcatggactc

SEQ ID NO: 523 - DNA, 21 bp, Artificial Sequence
  Primer TIE_F1
cggcctctggagtatggtctg

SEQ ID NO: 524 - DNA, 22 bp, Artificial Sequence
  Primer VEGFR1_F1
catggtcagctactgggacacc

SEQ ID NO: 525 - DNA, 21 bp, Artificial Sequence
  Primer VEGFR2_F1
aggtgcaggatgcagagcaag

SEQ ID NO: 526 - DNA, 19 bp, Artificial Sequence
  Primer VEGFR3_F1
agcggccggagatgcagcg

SEQ ID NO: 527 - DNA, 21 bp, Artificial Sequence
  Primer FLT3_R1
ctgctcgacacccactgtcca

SEQ ID NO: 528 - DNA, 21 bp, Artificial Sequence
  Primer KIT-R1
gcagaagtcttgcccacatcg

SEQ ID NO: 529 - DNA, 23 bp, Artificial Sequence
  Primer MET_R1
cttcgtgatcttcttcccagtga

SEQ ID NO: 530 - DNA, 22 bp, Artificial Sequence
  Primer PDGFRA_R1
agattcttagccaggcatcgca

SEQ ID NO: 531 - DNA, 20 bp, Artificial Sequence
  Primer PDGFRB_R1
agcgcaccgacagtggccga

SEQ ID NO: 532 - DNA, 20 bp, Artificial Sequence
  Primer RON_R1
gcacgggctgcccactgtca

SEQ ID NO: 533 - DNA, 24 bp, Artificial Sequence
  Primer TEK_R1
ctgtccgaggttccaaatagttga

SEQ ID NO: 534 - DNA, 21 bp, Artificial Sequence
  Primer TIE_R1
cgttctcactggggtccacca

SEQ ID NO: 535 - DNA, 22 bp, Artificial Sequence
  Primer VEGFR1_R1
attattgccatgcgctgagtga

SEQ ID NO: 536 - DNA, 21 bp, Artificial Sequence
  Primer VEGFR2_R1
gccgcttggataacaagggta

SEQ ID NO: 537 - DNA, 22 bp, Artificial Sequence
  Primer VEGFR3_R1
aactcggtccaggtgtccaggc

SEQ ID NO: 538 - DNA, 24 bp, Artificial Sequence
  Primer FLT3_R2
cttggaaactcccatttgagatca

SEQ ID NO: 539 - DNA, 21 bp, Artificial Sequence
  Primer KIT-R2
acaaccttcccgaaagctcca

SEQ ID NO: 540 - DNA, 22 bp, Artificial Sequence
  Primer MET_R2
actacatgctgcactgcctgga

SEQ ID NO: 541 - DNA, 22 bp, Artificial Sequence
  Primer PDGFRA_R2
cccgaccaagcactagtccatc

SEQ ID NO: 542 - DNA, 20 bp, Artificial Sequence
  Primer PDGFRB_R2
ccagagccgagggtgcgtcc

SEQ ID NO: 543 - DNA, 22 bp, Artificial Sequence
  Primer RON_R2
caggtcattcaggttgggagga

SEQ ID NO: 544 - DNA, 24 bp, Artificial Sequence
  Primer TEK_R2
atttgatgtcattccagtcaagca

SEQ ID NO: 545 - DNA, 21 bp, Artificial Sequence
  Primer TIE_R2
agcactgggtagctcaggggc

SEQ ID NO: 546 - DNA, 21 bp, Artificial Sequence
  Primer VEGFR1_R2
aactcccacttgctggcatca

SEQ ID NO: 547 - DNA, 21 bp, Artificial Sequence
  Primer VEGFR2_R2
aattcccatttgctggcatca

SEQ ID NO: 548 - DNA, 22 bp, Artificial Sequence
  Primer VEGFR3_R2
attcccactggctggcatcgta

SEQ ID NO: 549 - DNA, 20 bp, Artificial Sequence
  Primer RAGE_Fu
caggaccctggaaggaagca

SEQ ID NO: 550 - DNA, 19 bp, Artificial Sequence
  Primer RAGE_F1
aggatggcagccggaacag

SEQ ID NO: 551 - DNA, 20 bp, Artificial Sequence
  Primer RAGE_flR1
cccctcaaggccctccagta

SEQ ID NO: 552 - DNA, 21 bp, Artificial Sequence
  Primer RAGE_Intron3R1
ggaagtcagaggccctcatgg

SEQ ID NO: 553 - DNA, 22 bp, Artificial Sequence
  Primer RAGE_Intron4R1
gggaaagagtggtgacctcaga

SEQ ID NO: 554 - DNA, 22 bp, Artificial Sequence
  Primer RAGE_Intron5R1
cttggggggcaccttaggactc

SEQ ID NO: 555 - DNA, 23 bp, Artificial Sequence
  Primer RAGE_Intron6R1
actccctctttccctaagggtca

SEQ ID NO: 556 - DNA, 23 bp, Artificial Sequence
  Primer RAGE_Intron7R1
gttatggttcaccctacctccca

SEQ ID NO: 557 - DNA, 24 bp, Artificial Sequence
  Primer RAGE_Intron8R1
atttagctcagagggaagaaggga

SEQ ID NO: 558 - DNA, 20 bp, Artificial Sequence
  Primer HGF_F1
aggattctttcacccaggca

SEQ ID NO: 559 - DNA, 21 bp, Artificial Sequence
  Primer HGF_intron11R1
gaataaatgccagaccaccta

SEQ ID NO: 560 - DNA, 20 bp, Artificial Sequence
  Primer HGF_F2
accatgtgggtgaccaaact

SEQ ID NO: 561 - DNA, 23 bp, Artificial Sequence
  Primer HGF_intron11R2
tcacaagacaccaatccctaact

SEQ ID NO: 562 - DNA, 25 bp, Artificial Sequence
  Primer HGF_intron13R1
tccatatttctgggaataggaggac

SEQ ID NO: 563 - protein, 5 aa, Artificial Sequence
  Synthetic peptide containing propeptide and linker segments
GARSR

SEQ ID NO: 564 - protein, 5 aa, Artificial Sequence
  Synthetic peptide containing propeptide and linker segments
GARLE

SEQ ID NO: 565 - protein, 330 aa, Homo Sapiens [sequence omitted]

SEQ ID NO: 566 - protein, 231 aa, Artificial Sequence
  hIgG1 Fc
PKSCDKTHTCPPCPAPELLGGPSVFLFPPKPKDTLMISRTPEVTCVVVDVSHEDPEVKFNWYVDGVEVHNAKTKPREEQYNSTYRVVSVLTVLHQDWLNGKEYKCKVSNKALPAPIEKTISKAKGQPREPQVYTLPPSREEMTKNQVSLTCLVKGFYPSDIAVEWESNGQPENNYKTTPPVLDSDGSFFLYSKLTVDKSRWQQGNVFSCSVMHEALHNHYTQKSLSLSPGK

SEQ ID NO: 567 - protein, 232 aa, Artificial Sequence
  hIgG1 Fc
EPRSCDKTHTCPPCPAPELLGGPSVFLFPPKPKDTLMISRTPEVTCVVVDVSHEDPEVKFNWYVDGVEVHNAKTKPREEQYNSTYRVVSVLTVLHQDWLNGKDYKCKVSNKALPAPMQKTISKAKGQPREPQVYTLPPSRDELTKNQVSLTCLVKGFYPRHIAVEWESNGQPENNYKTTPPVLDSDGSFFLYSKLTVDKSRWQQGNVFSCSVMHEALHNHYTQKSLSLSPGK

SEQ ID NO: 568 - protein, 232 aa, Artificial Sequence
  hIgG1 Fc mutein
EPRSCDKTHTCPPCPAPEAEGAPSVFLFPPKPKDTLMISRTPEVTCVVVDVSHEDPEVKFNWYVDGVEVHNAKTKPREEQYNSTYRVVSVLTVLHQDWLNGKDYKCKVSNKALPAPMQKTISKAKGQPREPQVYTLPPSRDELTKNQVSLTCLVKGFYPRHIAVEWESNGQPENNYKTTPPVLDSDGSFFLYSKLTVDKSRWQQGNVFSCSVMHEALHNHYTQKSLSLSPGK

SEQ ID NO: 569 - protein, 39 aa, Artificial Sequence
  c-jun leucine zipper
RIARLEEKVKTLKAQNSELASTANMLREQVAQLKQKVMN

SEQ ID NO: 570 - protein, 39 aa, Artificial Sequence
  c-fos leucine zipper
LTDTLQAETDQLEDEKSALQTEIANLLKEKEKLEFILAA

SEQ ID NO: 571 - protein, 43 aa, Artificial Sequence
  modified c-jun leucine zipper
CGGRIARLEEKVKTLKAQNSELASTANMLREQVAQLKQKVMNY

SEQ ID NO: 572 - protein, 43 aa, Artificial Sequence
  modified c-fos leucine zipper
CGGLTDTLQAETDQLEDEKSALQTEIANLLKEKEKLEFILAAY

SEQ ID NO: 573 - protein, 33 aa, Artificial Sequence
  GCN4 leucine zipper
RMKQLEDKVEELLSKNYHLENEVARLKKLVGER

SEQ ID NO: 574 - protein, 33 aa, Artificial Sequence
  GCN4 leucine zipper- trimer
RMKQIEDKIEEILSKIYHIENEIARIKKLIGER

SEQ ID NO: 575 - protein, 33 aa, Artificial Sequence
  GCN4 leucine zipper- tetramer
RMKQIEDKLEEILSKLYHIENELARIKKLLGER

SEQ ID NO: 576 - protein, 44 aa, Artificial Sequence
  R subunit
SHIQIPPGLTELLQGYTVEVLRQQPPDLVEFAVEYFTRLREARA

SEQ ID NO: 577 - protein, 17 aa, Artificial Sequence
  AD
QIEYLAKQIVDNAIQQA

SEQ ID NO: 578 - protein, 45 aa, Artificial Sequence
  modified R subunit
CSHIQIPPGLTELLQGYTVEVLRQQPPDLVEFAVEYFTRLREARA

SEQ ID NO: 579 - protein, 21 aa, Artificial Sequence
  modified AD subunit
CGQIEYLAKQIVDNAIQQAGC

SEQ ID NO: 580 - protein, 5 aa, Artificial Sequence
  linker
GGGGS

SEQ ID NO: 581 - protein, 5 aa, Artificial Sequence
  linker
SSSSG

SEQ ID NO: 582 - protein, 5 aa, Artificial Sequence
  linker
GGGGG
